United States Patent Application Publication US 2005/0255487 A1 - sequence listing, part 97

SEQ ID NO: 2668650 - RNA, 19 nt, Homo sapiens
  misc_RNA (1)...(19): siRNA sense strand
gcaguaugucugucaagaa

SEQ ID NO: 2668651 - RNA, 19 nt, Homo sapiens
  misc_RNA (1)...(19): siRNA sense strand
acccagaacagucgaacaa

SEQ ID NO: 2668652 - RNA, 19 nt, Homo sapiens
  misc_RNA (1)...(19): siRNA sense strand
gcaaugucacagaugaauu

SEQ ID NO: 2668653 - RNA, 19 nt, Homo sapiens
  misc_RNA (1)...(19): siRNA sense strand
ccagaaacuaaaggagcua

SEQ ID NO: 2668654 - RNA, 19 nt, Homo sapiens
  misc_RNA (1)...(19): siRNA sense strand
agaagcaauccuaacauua

SEQ ID NO: 2668655 - RNA, 19 nt, Homo sapiens
  misc_RNA (1)...(19): siRNA sense strand
gcguauaaucuaacugguu

SEQ ID NO: 2668656 - RNA, 19 nt, Homo sapiens
  misc_RNA (1)...(19): siRNA sense strand
aggucgggcuucacauaaa

SEQ ID NO: 2668657 - RNA, 19 nt, Homo sapiens
  misc_RNA (1)...(19): siRNA sense strand
acuaaauguacuuggcuca

SEQ ID NO: 2668658 - RNA, 19 nt, Homo sapiens
  misc_RNA (1)...(19): siRNA sense strand
ggcaaauggcagagagaca

SEQ ID NO: 2668659 - RNA, 19 nt, Homo sapiens
  misc_RNA (1)...(19): siRNA sense strand
gaucaacgguucacgggaa

SEQ ID NO: 2668660 - RNA, 19 nt, Homo sapiens
  misc_RNA (1)...(19): siRNA sense strand
cauugaugcuuguggucau

SEQ ID NO: 2668661 - RNA, 19 nt, Homo sapiens
  misc_RNA (1)...(19): siRNA sense strand
uggcacaucaagaggaaaa

SEQ ID NO: 2668662 - RNA, 19 nt, Homo sapiens
  misc_RNA (1)...(19): siRNA sense strand
gcuacagcuggaagauaua

SEQ ID NO: 2668663 - RNA, 19 nt, Homo sapiens
  misc_RNA (1)...(19): siRNA sense strand
ccaaauggagggaagcaca

SEQ ID NO: 2668664 - RNA, 19 nt, Homo sapiens
  misc_RNA (1)...(19): siRNA sense strand
cuaugaaagguuagggugu

SEQ ID NO: 2668665 - RNA, 19 nt, Homo sapiens
  misc_RNA (1)...(19): siRNA sense strand
gggaauacauccaugcugu

SEQ ID NO: 2668666 - RNA, 19 nt, Homo sapiens
  misc_RNA (1)...(19): siRNA sense strand
caaaauuaaucgaugcaga

SEQ ID NO: 2668667 - RNA, 19 nt, Homo sapiens
  misc_RNA (1)...(19): siRNA sense strand
auggaaaacagauggcaaa

SEQ ID NO: 2668668 - RNA, 19 nt, Homo sapiens
  misc_RNA (1)...(19): siRNA sense strand
ugauaaauacaucugggaa

SEQ ID NO: 2668669 - RNA, 19 nt, Homo sapiens
  misc_RNA (1)...(19): siRNA sense strand
cagauguuaacguuggaaa

SEQ ID NO: 2668670 - RNA, 19 nt, Homo sapiens
  misc_RNA (1)...(19): siRNA sense strand
cagaauaaguugggagcag

SEQ ID NO: 2668671 - RNA, 19 nt, Homo sapiens
  misc_RNA (1)...(19): siRNA sense strand
gaggaaaagaaguuugcua

SEQ ID NO: 2668672 - RNA, 19 nt, Homo sapiens
  misc_RNA (1)...(19): siRNA sense strand
guucaguucaucuggaaaa

SEQ ID NO: 2668673 - RNA, 19 nt, Homo sapiens
  misc_RNA (1)...(19): siRNA sense strand
gguuaggguguuucaaaga

SEQ ID NO: 2668674 - RNA, 19 nt, Homo sapiens
  misc_RNA (1)...(19): siRNA sense strand
ggcagagagacaugugcaa

SEQ ID NO: 2668675 - RNA, 19 nt, Homo sapiens
  misc_RNA (1)...(19): siRNA sense strand
acacaaucccaaugccuau

SEQ ID NO: 2668676 - RNA, 19 nt, Homo sapiens
  misc_RNA (1)...(19): siRNA sense strand
ugccauugucaguggaaaa

SEQ ID NO: 2668677 - RNA, 19 nt, Homo sapiens
  misc_RNA (1)...(19): siRNA sense strand
augaaagguuaggguguuu

SEQ ID NO: 2668678 - RNA, 19 nt, Homo sapiens
  misc_RNA (1)...(19): siRNA sense strand
acagauggcaaauggcaga

SEQ ID NO: 2668679 - RNA, 19 nt, Homo sapiens
  misc_RNA (1)...(19): siRNA sense strand
gauggaaaacagauggcaa

SEQ ID NO: 2668680 - RNA, 19 nt, Homo sapiens
  misc_RNA (1)...(19): siRNA sense strand
uaaucgaugcagauguuaa

SEQ ID NO: 2668681 - RNA, 19 nt, Homo sapiens
  misc_RNA (1)...(19): siRNA sense strand
agaauaaguugggagcaga

SEQ ID NO: 2668682 - RNA, 19 nt, Homo sapiens
  misc_RNA (1)...(19): siRNA sense strand
cuuccuucuuugacuguaa

SEQ ID NO: 2668683 - RNA, 19 nt, Homo sapiens
  misc_RNA (1)...(19): siRNA sense strand
caggcaugacuuacacaaa

SEQ ID NO: 2668684 - RNA, 19 nt, Homo sapiens
  misc_RNA (1)...(19): siRNA sense strand
cuucuguagccaagacauu

SEQ ID NO: 2668685 - RNA, 19 nt, Homo sapiens
  misc_RNA (1)...(19): siRNA sense strand
gggcagucccuguggauga

SEQ ID NO: 2668686 - RNA, 19 nt, Homo sapiens
  misc_RNA (1)...(19): siRNA sense strand
gguggaggauggaggagau

SEQ ID NO: 2668687 - RNA, 19 nt, Homo sapiens
  misc_RNA (1)...(19): siRNA sense strand
guauaaagcaacaggcgga

SEQ ID NO: 2668688 - RNA, 19 nt, Homo sapiens
  misc_RNA (1)...(19): siRNA sense strand
uggagaaugucauaggaga

SEQ ID NO: 2668689 - RNA, 19 nt, Homo sapiens
  misc_RNA (1)...(19): siRNA sense strand
cggaauuaguggucucuga

SEQ ID NO: 2668690 - RNA, 19 nt, Homo sapiens
  misc_RNA (1)...(19): siRNA sense strand
caagaaagucaaagcccuu

SEQ ID NO: 2668691 - RNA, 19 nt, Homo sapiens
  misc_RNA (1)...(19): siRNA sense strand
ggguacagcggcagugaca

SEQ ID NO: 2668692 - RNA, 19 nt, Homo sapiens
  misc_RNA (1)...(19): siRNA sense strand
guagauuaugaguucgaaa

SEQ ID NO: 2668693 - RNA, 19 nt, Homo sapiens
  misc_RNA (1)...(19): siRNA sense strand
ccuugaaaucuuugcuuau

SEQ ID NO: 2668694 - RNA, 19 nt, Homo sapiens
  misc_RNA (1)...(19): siRNA sense strand
cgauagcaucauugagcau

SEQ ID NO: 2668695 - RNA, 19 nt, Homo sapiens
  misc_RNA (1)...(19): siRNA sense strand
agaaggacgcagugcccaa

SEQ ID NO: 2668696 - RNA, 19 nt, Homo sapiens
  misc_RNA (1)...(19): siRNA sense strand
gugauaaguaugugguugu

SEQ ID NO: 2668697 - RNA, 19 nt, Homo sapiens
  misc_RNA (1)...(19): siRNA sense strand
gcaagaaagucaaagcccu

SEQ ID NO: 2668698 - RNA, 19 nt, Homo sapiens
  misc_RNA (1)...(19): siRNA sense strand
cgcugaaggagcugaguga

SEQ ID NO: 2668699 - RNA, 19 nt, Homo sapiens
  misc_RNA (1)...(19): siRNA sense strand
accgcuacguggagggcaa

SEQ ID NO: 2668700 - RNA, 19 nt, Homo sapiens
  misc_RNA (1)...(19): siRNA sense strand
ccugagaagcugcugguga

SEQ ID NO: 2668701 - RNA, 19 nt, Homo sapiens
  misc_RNA (1)...(19): siRNA sense strand
gcagcaaggcagccgucaa

SEQ ID NO: 2668702 - RNA, 19 nt, Homo sapiens
  misc_RNA (1)...(19): siRNA sense strand
accuuaaggaacuguauaa

SEQ ID NO: 2668703 - RNA, 19 nt, Homo sapiens
  misc_RNA (1)...(19): siRNA sense strand
gaguagauuaugaguucga

SEQ ID NO: 2668704 - RNA, 19 nt, Homo sapiens
  misc_RNA (1)...(19): siRNA sense strand
cgacagugcccugcagcua

SEQ ID NO: 2668705 - RNA, 19 nt, Homo sapiens
  misc_RNA (1)...(19): siRNA sense strand
cgaccauggcggacaagga

SEQ ID NO: 2668706 - RNA, 19 nt, Homo sapiens
  misc_RNA (1)...(19): siRNA sense strand
gaggagauggucugcgaca

SEQ ID NO: 2668707 - RNA, 19 nt, Homo sapiens
  misc_RNA (1)...(19): siRNA sense strand
gcggaaaagcaauguggau

SEQ ID NO: 2668708 - RNA, 19 nt, Homo sapiens
  misc_RNA (1)...(19): siRNA sense strand
aggcagccgucaaugggua

SEQ ID NO: 2668709 - RNA, 19 nt, Homo sapiens
  misc_RNA (1)...(19): siRNA sense strand
ggagauggucugcgacagu

SEQ ID NO: 2668710 - RNA, 19 nt, Homo sapiens
  misc_RNA (1)...(19): siRNA sense strand
cuacaagcaucacuggcaa

SEQ ID NO: 2668711 - RNA, 19 nt, Homo sapiens
  misc_RNA (1)...(19): siRNA sense strand
uguuauuuguguggugaaa

SEQ ID NO: 2668712 - RNA, 19 nt, Homo sapiens
  misc_RNA (1)...(19): siRNA sense strand
gauccguuccagagaguca

SEQ ID NO: 2668713 - RNA, 19 nt, Homo sapiens
  misc_RNA (1)...(19): siRNA sense strand
aagaaagaggagaggccca

SEQ ID NO: 2668714 - RNA, 19 nt, Homo sapiens
  misc_RNA (1)...(19): siRNA sense strand
gagugaagucuguggauaa

SEQ ID NO: 2668715 - RNA, 19 nt, Homo sapiens
  misc_RNA (1)...(19): siRNA sense strand
ggacagugccuuugagcaa

SEQ ID NO: 2668716 - RNA, 19 nt, Homo sapiens
  misc_RNA (1)...(19): siRNA sense strand
acaaaugagugaugaggaa

SEQ ID NO: 2668717 - RNA, 19 nt, Homo sapiens
  misc_RNA (1)...(19): siRNA sense strand
gagaagaaggaaaggagaa

SEQ ID NO: 2668718 - RNA, 19 nt, Homo sapiens
  misc_RNA (1)...(19): siRNA sense strand
aaauaaagcaagagcagaa

SEQ ID NO: 2668719 - RNA, 19 nt, Homo sapiens
  misc_RNA (1)...(19): siRNA sense strand
gaggaggaccaguggaaua

SEQ ID NO: 2668720 - RNA, 19 nt, Homo sapiens
  misc_RNA (1)...(19): siRNA sense strand
augaagaugaagaggauaa

SEQ ID NO: 2668721 - RNA, 19 nt, Homo sapiens
  misc_RNA (1)...(19): siRNA sense strand
aggaagauauugaggacau

SEQ ID NO: 2668722 - RNA, 19 nt, Homo sapiens
  misc_RNA (1)...(19): siRNA sense strand
ggacacugaggaagagaaa

SEQ ID NO: 2668723 - RNA, 19 nt, Homo sapiens
  misc_RNA (1)...(19): siRNA sense strand
cugagaaggaggaggaaga

SEQ ID NO: 2668724 - RNA, 19 nt, Homo sapiens
  misc_RNA (1)...(19): siRNA sense strand
cagacgaugaagaggauaa

SEQ ID NO: 2668725 - RNA, 19 nt, Homo sapiens
  misc_RNA (1)...(19): siRNA sense strand
uugaugaggaagaggauaa

SEQ ID NO: 2668726 - RNA, 19 nt, Homo sapiens
  misc_RNA (1)...(19): siRNA sense strand
cauucaagguaguaaagaa

SEQ ID NO: 2668727 - RNA, 19 nt, Homo sapiens
  misc_RNA (1)...(19): siRNA sense strand
ggagaucuguucaaagaaa

SEQ ID NO: 2668728 - RNA, 19 nt, Homo sapiens
  misc_RNA (1)...(19): siRNA sense strand
cagcaggucuaaaggagaa

SEQ ID NO: 2668729 - RNA, 19 nt, Homo sapiens
  misc_RNA (1)...(19): siRNA sense strand
acacugaggaagagaaaga

SEQ ID NO: 2668730 - RNA, 19 nt, Homo sapiens
  misc_RNA (1)...(19): siRNA sense strand
agucaagcauucugauuua

SEQ ID NO: 2668731 - RNA, 19 nt, Homo sapiens
  misc_RNA (1)...(19): siRNA sense strand
gugaugaggaagaggauga

SEQ ID NO: 2668732 - RNA, 19 nt, Homo sapiens
  misc_RNA (1)...(19): siRNA sense strand
aagcaaauuuagcgaucaa

SEQ ID NO: 2668733 - RNA, 19 nt, Homo sapiens
  misc_RNA (1)...(19): siRNA sense strand
ggucaaagcuguucaugga

SEQ ID NO: 2668734 - RNA, 19 nt, Homo sapiens
  misc_RNA (1)...(19): siRNA sense strand
cucaaagagaagaaggaaa

SEQ ID NO: 2668735 - RNA, 19 nt, Homo sapiens
  misc_RNA (1)...(19): siRNA sense strand
ggcaaagauagcagagaau

SEQ ID NO: 2668736 - RNA, 19 nt, Homo sapiens
  misc_RNA (1)...(19): siRNA sense strand
ugaugaagaugaagaggau

SEQ ID NO: 2668737 - RNA, 19 nt, Homo sapiens
  misc_RNA (1)...(19): siRNA sense strand
ggauaaaauggaagaucaa

SEQ ID NO: 2668738 - RNA, 19 nt, Homo sapiens
  misc_RNA (1)...(19): siRNA sense strand
gcguguauaugaugaagaa

SEQ ID NO: 2668739 - RNA, 19 nt, Homo sapiens
  misc_RNA (1)...(19): siRNA sense strand
ggaagacacucaaagagaa

SEQ ID NO: 2668740 - RNA, 19 nt, Homo sapiens
  misc_RNA (1)...(19): siRNA sense strand
agagagaagagaaagcaaa

SEQ ID NO: 2668741 - RNA, 19 nt, Homo sapiens
  misc_RNA (1)...(19): siRNA sense strand
cacagaaagaaguaggaaa

SEQ ID NO: 2668742 - RNA, 19 nt, Homo sapiens
  misc_RNA (1)...(19): siRNA sense strand
acucagacuccgaggaaga

SEQ ID NO: 2668743 - RNA, 19 nt, Homo sapiens
  misc_RNA (1)...(19): siRNA sense strand
ggacaaugacccagauguu

SEQ ID NO: 2668744 - RNA, 19 nt, Homo sapiens
  misc_RNA (1)...(19): siRNA sense strand
gcgaugaagaagagaagga

SEQ ID NO: 2668745 - RNA, 19 nt, Homo sapiens
  misc_RNA (1)...(19): siRNA sense strand
aagaagagaaggaggcaca

SEQ ID NO: 2668746 - RNA, 19 nt, Homo sapiens
  misc_RNA (1)...(19): siRNA sense strand
agaaggaggaggaagauau

SEQ ID NO: 2668747 - RNA, 19 nt, Homo sapiens
  misc_RNA (1)...(19): siRNA sense strand
cggaagacacucaaagaga

SEQ ID NO: 2668748 - RNA, 19 nt, Homo sapiens
  misc_RNA (1)...(19): siRNA sense strand
agaaagaaguagaucucau

SEQ ID NO: 2668749 - RNA, 19 nt, Homo sapiens
  misc_RNA (1)...(19): siRNA sense strand
ccgaggaagaugaugcuaa

SEQ ID NO: 2668750 - RNA, 19 nt, Homo sapiens
  misc_RNA (1)...(19): siRNA sense strand
cgaggaagaugaugcuaau

SEQ ID NO: 2668751 - RNA, 19 nt, Homo sapiens
  misc_RNA (1)...(19): siRNA sense strand
gaagaaaauacuagaccua

SEQ ID NO: 2668752 - RNA, 19 nt, Homo sapiens
  misc_RNA (1)...(19): siRNA sense strand
ggauaagaagguugagagu

SEQ ID NO: 2668753 - RNA, 19 nt, Homo sapiens
  misc_RNA (1)...(19): siRNA sense strand
gaacuauggcuuacaagua

SEQ ID NO: 2668754 - RNA, 19 nt, Homo sapiens
  misc_RNA (1)...(19): siRNA sense strand
aagaagaggaggagucaga

SEQ ID NO: 2668755 - RNA, 19 nt, Homo sapiens
  misc_RNA (1)...(19): siRNA sense strand
caucagaaacaaagacuca

SEQ ID NO: 2668756 - RNA, 19 nt, Homo sapiens
  misc_RNA (1)...(19): siRNA sense strand
cgggaagauacaagcaaau

SEQ ID NO: 2668757 - RNA, 19 nt, Homo sapiens
  misc_RNA (1)...(19): siRNA sense strand
ccuaaaagaagcagaccua

SEQ ID NO: 2668758 - RNA, 19 nt, Homo sapiens
  misc_RNA (1)...(19): siRNA sense strand
gagagaagagaaagcaaaa

SEQ ID NO: 2668759 - RNA, 19 nt, Homo sapiens
  misc_RNA (1)...(19): siRNA sense strand
aagaagacccagagagugu

SEQ ID NO: 2668760 - RNA, 19 nt, Homo sapiens
  misc_RNA (1)...(19): siRNA sense strand
ggagugaagucuguggaua

SEQ ID NO: 2668761 - RNA, 19 nt, Homo sapiens
  misc_RNA (1)...(19): siRNA sense strand
uauccaggcuccacagaaa

SEQ ID NO: 2668762 - RNA, 19 nt, Homo sapiens
  misc_RNA (1)...(19): siRNA sense strand
aggaggacucugaggauuu

SEQ ID NO: 2668763 - RNA, 19 nt, Homo sapiens
  misc_RNA (1)...(19): siRNA sense strand
aagagaaagaagaggagga

SEQ ID NO: 2668764 - RNA, 19 nt, Homo sapiens
  misc_RNA (1)...(19): siRNA sense strand
cgauaucuuuggugacgaa

SEQ ID NO: 2668765 - RNA, 19 nt, Homo sapiens
  misc_RNA (1)...(19): siRNA sense strand
guuugaugaugaagaugaa

SEQ ID NO: 2668766 - RNA, 19 nt, Homo sapiens
  misc_RNA (1)...(19): siRNA sense strand
uugcaaagucucuggguca

SEQ ID NO: 2668767 - RNA, 19 nt, Homo sapiens
  misc_RNA (1)...(19): siRNA sense strand
cgaugaagaggauaacuua

SEQ ID NO: 2668768 - RNA, 19 nt, Homo sapiens
  misc_RNA (1)...(19): siRNA sense strand
ggaagauacaagcaaauuu

SEQ ID NO: 2668769 - RNA, 19 nt, Homo sapiens
  misc_RNA (1)...(19): siRNA sense strand
ccaaaagaaaaguccaaaa

SEQ ID NO: 2668770 - RNA, 19 nt, Homo sapiens
  misc_RNA (1)...(19): siRNA sense strand
uaucaaagcaggaaacuca

SEQ ID NO: 2668771 - RNA, 19 nt, Homo sapiens
  misc_RNA (1)...(19): siRNA sense strand
gccuuugguacaagagaaa

SEQ ID NO: 2668772 - RNA, 19 nt, Homo sapiens
  misc_RNA (1)...(19): siRNA sense strand
aaaagaaaguggaagccaa

SEQ ID NO: 2668773 - RNA, 19 nt, Homo sapiens
  misc_RNA (1)...(19): siRNA sense strand
auacauugaucguccuuua

SEQ ID NO: 2668774 - RNA, 19 nt, Homo sapiens
  misc_RNA (1)...(19): siRNA sense strand
agaaagaagaggaggaguc

SEQ ID NO: 2668775 - RNA, 19 nt, Homo sapiens
  misc_RNA (1)...(19): siRNA sense strand
caucaaugaaggagccaca

SEQ ID NO: 2668776 - RNA, 19 nt, Homo sapiens
  misc_RNA (1)...(19): siRNA sense strand
cagagagaagagaaagcaa

SEQ ID NO: 2668777 - RNA, 19 nt, Homo sapiens
  misc_RNA (1)...(19): siRNA sense strand
ucgggaagauacaagcaaa

SEQ ID NO: 2668778 - RNA, 19 nt, Homo sapiens
  misc_RNA (1)...(19): siRNA sense strand
agucaagaagaaugagaca

SEQ ID NO: 2668779 - RNA, 19 nt, Homo sapiens
  misc_RNA (1)...(19): siRNA sense strand
aaaccagagagaaggagaa

SEQ ID NO: 2668780 - RNA, 19 nt, Homo sapiens
  misc_RNA (1)...(19): siRNA sense strand
aggaagagaaagaagagga

SEQ ID NO: 2668781 - RNA, 19 nt, Homo sapiens
  misc_RNA (1)...(19): siRNA sense strand
gagaaggaggaggaagaua

SEQ ID NO: 2668782 - RNA, 19 nt, Homo sapiens
  misc_RNA (1)...(19): siRNA sense strand
ggagaagacacgagagcag

SEQ ID NO: 2668783 - RNA, 19 nt, Homo sapiens
  misc_RNA (1)...(19): siRNA sense strand
ggaaccaagccuagaacca

SEQ ID NO: 2668784 - RNA, 19 nt, Homo sapiens
  misc_RNA (1)...(19): siRNA sense strand
acagaaagaaguaggaaag

SEQ ID NO: 2668785 - RNA, 19 nt, Homo sapiens
  misc_RNA (1)...(19): siRNA sense strand
ugauauauuugcuacggaa

SEQ ID NO: 2668786 - RNA, 19 nt, Homo sapiens
  misc_RNA (1)...(19): siRNA sense strand
cagcaaaccuucuaaaaca

SEQ ID NO: 2668787 - RNA, 19 nt, Homo sapiens
  misc_RNA (1)...(19): siRNA sense strand
gggaugaugaagaugauga

SEQ ID NO: 2668788 - RNA, 19 nt, Homo sapiens
  misc_RNA (1)...(19): siRNA sense strand
ucaaagagaagaaggaaag

SEQ ID NO: 2668789 - RNA, 19 nt, Homo sapiens
  misc_RNA (1)...(19): siRNA sense strand
gcaucugacagcaggucua

SEQ ID NO: 2668790 - RNA, 19 nt, Homo sapiens
  misc_RNA (1)...(19): siRNA sense strand
caaaggaucuauacauuga

SEQ ID NO: 2668791 - RNA, 19 nt, Homo sapiens
  misc_RNA (1)...(19): siRNA sense strand
ggaggaagauauugaggac

SEQ ID NO: 2668792 - RNA, 19 nt, Homo sapiens
  misc_RNA (1)...(19): siRNA sense strand
gcuuguuugaugaggaaga

SEQ ID NO: 2668793 - RNA, 19 nt, Homo sapiens
  misc_RNA (1)...(19): siRNA sense strand
aggauaaaauggaagauca

SEQ ID NO: 2668794 - RNA, 19 nt, Homo sapiens
  misc_RNA (1)...(19): siRNA sense strand
agacacgagagcagaaaga

SEQ ID NO: 2668795 - RNA, 19 nt, Homo sapiens
  misc_RNA (1)...(19): siRNA sense strand
aggaggagucagaugaaga

SEQ ID NO: 2668796 - RNA, 19 nt, Homo sapiens
  misc_RNA (1)...(19): siRNA sense strand
aagcagaccuacaucguuu

SEQ ID NO: 2668797 - RNA, 19 nt, Homo sapiens
  misc_RNA (1)...(19): siRNA sense strand
agacacucaaagagaagaa

SEQ ID NO: 2668798 - RNA, 19 nt, Homo sapiens
  misc_RNA (1)...(19): siRNA sense strand
guguauaugaugaagaagu

SEQ ID NO: 2668799 - RNA, 19 nt, Homo sapiens
  misc_RNA (1)...(19): siRNA sense strand
agcucagagagaagagaaa

SEQ ID NO: 2668800 - RNA, 19 nt, Homo sapiens
  misc_RNA (1)...(19): siRNA sense strand
aaacagagcaggagaagac

SEQ ID NO: 2668801 - RNA, 19 nt, Homo sapiens
  misc_RNA (1)...(19): siRNA sense strand
cuacaagcucagagagaag

SEQ ID NO: 2668802 - RNA, 19 nt, Homo sapiens
  misc_RNA (1)...(19): siRNA sense strand
ggcauauggaagccagaaa

SEQ ID NO: 2668803 - RNA, 19 nt, Homo sapiens
  misc_RNA (1)...(19): siRNA sense strand
ggaacugauccuugaacca

SEQ ID NO: 2668804 - RNA, 19 nt, Homo sapiens
  misc_RNA (1)...(19): siRNA sense strand
ccacaguagaagagaucaa

SEQ ID NO: 2668805 - RNA, 19 nt, Homo sapiens
  misc_RNA (1)...(19): siRNA sense strand
gaacaaaggaaaaggguga

SEQ ID NO: 2668806 - RNA, 19 nt, Homo sapiens
  misc_RNA (1)...(19): siRNA sense strand
ggagaaggauuacgggaca

SEQ ID NO: 2668807 - RNA, 19 nt, Homo sapiens
  misc_RNA (1)...(19): siRNA sense strand
ggaaagagcccgcuggugu

SEQ ID NO: 2668808 - RNA, 19 nt, Homo sapiens
  misc_RNA (1)...(19): siRNA sense strand
agaggaaagcccagcggaa

SEQ ID NO: 2668809 - RNA, 19 nt, Homo sapiens
  misc_RNA (1)...(19): siRNA sense strand
gcaagaggcaacaaggaga

SEQ ID NO: 2668810 - RNA, 19 nt, Homo sapiens
  misc_RNA (1)...(19): siRNA sense strand
guguucagauagaaagcaa

SEQ ID NO: 2668811 - RNA, 19 nt, Homo sapiens
  misc_RNA (1)...(19): siRNA sense strand
ggaaggaggaccugaggca

SEQ ID NO: 2668812 - RNA, 19 nt, Homo sapiens
  misc_RNA (1)...(19): siRNA sense strand
aggaauguaagaagaguga

SEQ ID NO: 2668813 - RNA, 19 nt, Homo sapiens
  misc_RNA (1)...(19): siRNA sense strand
agacgcaaguacuggguca

SEQ ID NO: 2668814 - RNA, 19 nt, Homo sapiens
  misc_RNA (1)...(19): siRNA sense strand
cccaaagaacggugcauuu

SEQ ID NO: 2668815 - RNA, 19 nt, Homo sapiens
  misc_RNA (1)...(19): siRNA sense strand
ccacagauuaacagcagau

SEQ ID NO: 2668816 - RNA, 19 nt, Homo sapiens
  misc_RNA (1)...(19): siRNA sense strand
acaucaaagcuuccugaaa

SEQ ID NO: 2668817 - RNA, 19 nt, Homo sapiens
  misc_RNA (1)...(19): siRNA sense strand
uaacagacuccgugccgaa

SEQ ID NO: 2668818 - RNA, 19 nt, Homo sapiens
  misc_RNA (1)...(19): siRNA sense strand
ccuagugaacagagagcca

SEQ ID NO: 2668819 - RNA, 19 nt, Homo sapiens
  misc_RNA (1)...(19): siRNA sense strand
uguaguucccacagauuaa

SEQ ID NO: 2668820 - RNA, 19 nt, Homo sapiens
  misc_RNA (1)...(19): siRNA sense strand
aaggaggaccugaggcaga

SEQ ID NO: 2668821 - RNA, 19 nt, Homo sapiens
  misc_RNA (1)...(19): siRNA sense strand
agauggaguagauggccua

SEQ ID NO: 2668822 - RNA, 19 nt, Homo sapiens
  misc_RNA (1)...(19): siRNA sense strand
cguugaggcgggugcauuu

SEQ ID NO: 2668823 - RNA, 19 nt, Homo sapiens
  misc_RNA (1)...(19): siRNA sense strand
cugcaagaucuuugaccuu

SEQ ID NO: 2668824 - RNA, 19 nt, Homo sapiens
  misc_RNA (1)...(19): siRNA sense strand
accaagucacuguaagaaa

SEQ ID NO: 2668825 - RNA, 19 nt, Homo sapiens
  misc_RNA (1)...(19): siRNA sense strand
aaggauuacgggacagcua

SEQ ID NO: 2668826 - RNA, 19 nt, Homo sapiens
  misc_RNA (1)...(19): siRNA sense strand
gaaaaggggaaaaggacca

SEQ ID NO: 2668827 - RNA, 19 nt, Homo sapiens
  misc_RNA (1)...(19): siRNA sense strand
ggaagcagcaagaggcaac

SEQ ID NO: 2668828 - RNA, 19 nt, Homo sapiens
  misc_RNA (1)...(19): siRNA sense strand
gauuaacagcagauggagu

SEQ ID NO: 2668829 - RNA, 19 nt, Homo sapiens
  misc_RNA (1)...(19): siRNA sense strand
ugagaauaagucaagagaa

SEQ ID NO: 2668830 - RNA, 19 nt, Homo sapiens
  misc_RNA (1)...(19): siRNA sense strand
gaguagauggccuagugaa

SEQ ID NO: 2668831 - RNA, 19 nt, Homo sapiens
  misc_RNA (1)...(19): siRNA sense strand
acagagagccaauaagcga

SEQ ID NO: 2668832 - RNA, 19 nt, Homo sapiens
  misc_RNA (1)...(19): siRNA sense strand
gaauaagucaagagaaaac

SEQ ID NO: 2668833 - RNA, 19 nt, Homo sapiens
  misc_RNA (1)...(19): siRNA sense strand
acaugauauuugagggaaa

SEQ ID NO: 2668834 - RNA, 19 nt, Homo sapiens
  misc_RNA (1)...(19): siRNA sense strand
ccgaggagugggagaauaa

SEQ ID NO: 2668835 - RNA, 19 nt, Homo sapiens
  misc_RNA (1)...(19): siRNA sense strand
ggaaacagugagaaggaga

SEQ ID NO: 2668836 - RNA, 19 nt, Homo sapiens
  misc_RNA (1)...(19): siRNA sense strand
caccacaauuauaaggaaa

SEQ ID NO: 2668837 - RNA, 19 nt, Homo sapiens
  misc_RNA (1)...(19): siRNA sense strand
agguaaacacagcaacaaa

SEQ ID NO: 2668838 - RNA, 19 nt, Homo sapiens
  misc_RNA (1)...(19): siRNA sense strand
cgugaagaugucagagaga

SEQ ID NO: 2668839 - RNA, 19 nt, Homo sapiens
  misc_RNA (1)...(19): siRNA sense strand
ugagagauucacauggaaa

SEQ ID NO: 2668840 - RNA, 19 nt, Homo sapiens
  misc_RNA (1)...(19): siRNA sense strand
gcuggaagucugaacgauu

SEQ ID NO: 2668841 - RNA, 19 nt, Homo sapiens
  misc_RNA (1)...(19): siRNA sense strand
auaaggucauggugagcaa

SEQ ID NO: 2668842 - RNA, 19 nt, Homo sapiens
  misc_RNA (1)...(19): siRNA sense strand
ugaagaugucagagagagu

SEQ ID NO: 2668843 - RNA, 19 nt, Homo sapiens
  misc_RNA (1)...(19): siRNA sense strand
agacaugauauuugaggga

SEQ ID NO: 2668844 - RNA, 19 nt, Homo sapiens
  misc_RNA (1)...(19): siRNA sense strand
cauuaaaggcuuggugaga

SEQ ID NO: 2668845 - RNA, 19 nt, Homo sapiens
  misc_RNA (1)...(19): siRNA sense strand
ccuccacggugaagcgcua

SEQ ID NO: 2668846 - RNA, 19 nt, Homo sapiens
  misc_RNA (1)...(19): siRNA sense strand
gagagauucacauggaaaa

SEQ ID NO: 2668847 - RNA, 19 nt, Homo sapiens
  misc_RNA (1)...(19): siRNA sense strand
aagaauggaucuggagaca

SEQ ID NO: 2668848 - RNA, 19 nt, Homo sapiens
  misc_RNA (1)...(19): siRNA sense strand
gagacgacagcguggguga

SEQ ID NO: 2668849 - RNA, 19 nt, Homo sapiens
  misc_RNA (1)...(19): siRNA sense strand
gguaaacacagcaacaaaa

SEQ ID NO: 2668850 - RNA, 19 nt, Homo sapiens
  misc_RNA (1)...(19): siRNA sense strand
cguagaaggcauuaaccau

SEQ ID NO: 2668851 - RNA, 19 nt, Homo sapiens
  misc_RNA (1)...(19): siRNA sense strand
ccagguaaacacagcaaca

SEQ ID NO: 2668852 - RNA, 19 nt, Homo sapiens
  misc_RNA (1)...(19): siRNA sense strand
agggaaacagugagaagga

SEQ ID NO: 2668853 - RNA, 19 nt, Homo sapiens
  misc_RNA (1)...(19): siRNA sense strand
guugaugaaaguugugaau

SEQ ID NO: 2668854 - RNA, 19 nt, Homo sapiens
  misc_RNA (1)...(19): siRNA sense strand
ccguguggcccgugaagau

SEQ ID NO: 2668855 - RNA, 19 nt, Homo sapiens
  misc_RNA (1)...(19): siRNA sense strand
ugggagaauaaccgggaau

SEQ ID NO: 2668856 - RNA, 19 nt, Homo sapiens
  misc_RNA (1)...(19): siRNA sense strand
gaaacagugagaaggagau

SEQ ID NO: 2668857 - RNA, 19 nt, Homo sapiens
  misc_RNA (1)...(19): siRNA sense strand
gcaugagaauggagauccu

SEQ ID NO: 2668858 - RNA, 19 nt, Homo sapiens
  misc_RNA (1)...(19): siRNA sense strand
gauuauuacgggcaggaga

SEQ ID NO: 2668859 - RNA, 19 nt, Homo sapiens
  misc_RNA (1)...(19): siRNA sense strand
agaacuguaugguuggcua

SEQ ID NO: 2668860 - RNA, 19 nt, Homo sapiens
  misc_RNA (1)...(19): siRNA sense strand
ccucgaggacccugauuau

SEQ ID NO: 2668861 - RNA, 19 nt, Homo sapiens
  misc_RNA (1)...(19): siRNA sense strand
gguucaucguggcauuaaa

SEQ ID NO: 2668862 - RNA, 19 nt, Homo sapiens
  misc_RNA (1)...(19): siRNA sense strand
ggagcaucugcaugagaau

SEQ ID NO: 2668863 - RNA, 19 nt, Homo sapiens
  misc_RNA (1)...(19): siRNA sense strand
gaaugaaaugugucccaau

SEQ ID NO: 2668864 - RNA, 19 nt, Homo sapiens
  misc_RNA (1)...(19): siRNA sense strand
agucauagccuggauggaa

SEQ ID NO: 2668865 - RNA, 19 nt, Homo sapiens
  misc_RNA (1)...(19): siRNA sense strand
ggaggagggcacugucaau

SEQ ID NO: 2668866 - RNA, 19 nt, Homo sapiens
  misc_RNA (1)...(19): siRNA sense strand
ucacagacuuccagcucca

SEQ ID NO: 2668867 - RNA, 19 nt, Homo sapiens
  misc_RNA (1)...(19): siRNA sense strand
ccaccaagcccaagaaagc

SEQ ID NO: 2668868 - RNA, 19 nt, Homo sapiens
  misc_RNA (1)...(19): siRNA sense strand
gcggagaaacagagggaaa

SEQ ID NO: 2668869 - RNA, 19 nt, Homo sapiens
  misc_RNA (1)...(19): siRNA sense strand
gaggaagaagagagggaaa

SEQ ID NO: 2668870 - RNA, 19 nt, Homo sapiens
  misc_RNA (1)...(19): siRNA sense strand
cagcauaugccaagagaga

SEQ ID NO: 2668871 - RNA, 19 nt, Homo sapiens
  misc_RNA (1)...(19): siRNA sense strand
gggagaggaaagauggaaa

SEQ ID NO: 2668872 - RNA, 19 nt, Homo sapiens
  misc_RNA (1)...(19): siRNA sense strand
agucagaaauaguagagaa

SEQ ID NO: 2668873 - RNA, 19 nt, Homo sapiens
  misc_RNA (1)...(19): siRNA sense strand
cagaaauaguagagaauuc

SEQ ID NO: 2668874 - RNA, 19 nt, Homo sapiens
  misc_RNA (1)...(19): siRNA sense strand
ggauaaaagcaaaggcaau

SEQ ID NO: 2668875 - RNA, 19 nt, Homo sapiens
  misc_RNA (1)...(19): siRNA sense strand
ggagaaagugagagcugua

SEQ ID NO: 2668876 - RNA, 19 nt, Homo sapiens
  misc_RNA (1)...(19): siRNA sense strand
gcauaguaauauugcguga

SEQ ID NO: 2668877 - RNA, 19 nt, Homo sapiens
  misc_RNA (1)...(19): siRNA sense strand
ggaagaaaagggaggagaa

SEQ ID NO: 2668878 - RNA, 19 nt, Homo sapiens
  misc_RNA (1)...(19): siRNA sense strand
cauguaaagaagaggaaga

SEQ ID NO: 2668879 - RNA, 19 nt, Homo sapiens
  misc_RNA (1)...(19): siRNA sense strand
aagaagaggaagagagacu

SEQ ID NO: 2668880 - RNA, 19 nt, Homo sapiens
  misc_RNA (1)...(19): siRNA sense strand
acgcuaagguuguggcuga

SEQ ID NO: 2668881 - RNA, 19 nt, Homo sapiens
  misc_RNA (1)...(19): siRNA sense strand
gggcggaauccuaguaaau

SEQ ID NO: 2668882 - RNA, 19 nt, Homo sapiens
  misc_RNA (1)...(19): siRNA sense strand
gcaguggugaugagaguaa

SEQ ID NO: 2668883 - RNA, 19 nt, Homo sapiens
  misc_RNA (1)...(19): siRNA sense strand
ccaagguggcggagaaaca

SEQ ID NO: 2668884 - RNA, 19 nt, Homo sapiens
  misc_RNA (1)...(19): siRNA sense strand
cgucaaaggugaggagguu

SEQ ID NO: 2668885 - RNA, 19 nt, Homo sapiens
  misc_RNA (1)...(19): siRNA sense strand
cagcaguggugaugagagu

SEQ ID NO: 2668886 - RNA, 19 nt, Homo sapiens
  misc_RNA (1)...(19): siRNA sense strand
agagaguccaggagggcaa

SEQ ID NO: 2668887 - RNA, 19 nt, Homo sapiens
  misc_RNA (1)...(19): siRNA sense strand
gucagaaauaguagagaau

SEQ ID NO: 2668888 - RNA, 19 nt, Homo sapiens
  misc_RNA (1)...(19): siRNA sense strand
caacauggacagugacuca

SEQ ID NO: 2668889 - RNA, 19 nt, Homo sapiens
  misc_RNA (1)...(19): siRNA sense strand
cagaggaagaagagaggga

SEQ ID NO: 2668890 - RNA, 19 nt, Homo sapiens
  misc_RNA (1)...(19): siRNA sense strand
uguguuaguucuagugcaa

SEQ ID NO: 2668891 - RNA, 19 nt, Homo sapiens
  misc_RNA (1)...(19): siRNA sense strand
auacaucaggguugaguaa

SEQ ID NO: 2668892 - RNA, 19 nt, Homo sapiens
  misc_RNA (1)...(19): siRNA sense strand
agcaaaggcaauagcuaua

SEQ ID NO: 2668893 - RNA, 19 nt, Homo sapiens
  misc_RNA (1)...(19): siRNA sense strand
ccagaaaacaagauaagua

SEQ ID NO: 2668894 - RNA, 19 nt, Homo sapiens
  misc_RNA (1)...(19): siRNA sense strand
ggucaugguguaagggcuu

SEQ ID NO: 2668895 - RNA, 19 nt, Homo sapiens
  misc_RNA (1)...(19): siRNA sense strand
uagcgagacaggaggaaau

SEQ ID NO: 2668896 - RNA, 19 nt, Homo sapiens
  misc_RNA (1)...(19): siRNA sense strand
caauuaaggcacggauaaa

SEQ ID NO: 2668897 - RNA, 19 nt, Homo sapiens
  misc_RNA (1)...(19): siRNA sense strand
cugaagcucuauugggaau

SEQ ID NO: 2668898 - RNA, 19 nt, Homo sapiens
  misc_RNA (1)...(19): siRNA sense strand
ugaccagggccaugagaau

SEQ ID NO: 2668899 - RNA, 19 nt, Homo sapiens
  misc_RNA (1)...(19): siRNA sense strand
aaacagaagcugaugcaca

SEQ ID NO: 2668900 - RNA, 19 nt, Homo sapiens
  misc_RNA (1)...(19): siRNA sense strand
aggaaaaggaaccagaaaa

SEQ ID NO: 2668901 - RNA, 19 nt, Homo sapiens
  misc_RNA (1)...(19): siRNA sense strand
uggaagaaguagaagcacu

SEQ ID NO: 2668902 - RNA, 19 nt, Homo sapiens
  misc_RNA (1)...(19): siRNA sense strand
agcaaaguauagugagaca

SEQ ID NO: 2668903 - RNA, 19 nt, Homo sapiens
  misc_RNA (1)...(19): siRNA sense strand
aagcaaaggcaauagcuau

SEQ ID NO: 2668904 - RNA, 19 nt, Homo sapiens
  misc_RNA (1)...(19): siRNA sense strand
ggugagaaugacaagaauu

SEQ ID NO: 2668905 - RNA, 19 nt, Homo sapiens
  misc_RNA (1)...(19): siRNA sense strand
acuacaugguauugaccua

SEQ ID NO: 2668906 - RNA, 19 nt, Homo sapiens
  misc_RNA (1)...(19): siRNA sense strand
accaagaagaggacagaau

SEQ ID NO: 2668907 - RNA, 19 nt, Homo sapiens
  misc_RNA (1)...(19): siRNA sense strand
ggaagaagagagggaaaca

SEQ ID NO: 2668908 - RNA, 19 nt, Homo sapiens
  misc_RNA (1)...(19): siRNA sense strand
agguuagaagguagugaaa

SEQ ID NO: 2668909 - RNA, 19 nt, Homo sapiens
  misc_RNA (1)...(19): siRNA sense strand
aagagaaguuucaugaaca

SEQ ID NO: 2668910 - RNA, 19 nt, Homo sapiens
  misc_RNA (1)...(19): siRNA sense strand
gcagaggacagauggccua

SEQ ID NO: 2668911 - RNA, 19 nt, Homo sapiens
  misc_RNA (1)...(19): siRNA sense strand
guuauacagaagucagaaa

SEQ ID NO: 2668912 - RNA, 19 nt, Homo sapiens
  misc_RNA (1)...(19): siRNA sense strand
agaaaagggaggagaaguu

SEQ ID NO: 2668913 - RNA, 19 nt, Homo sapiens
  misc_RNA (1)...(19): siRNA sense strand
gauaaaagcaaaggcaaua

SEQ ID NO: 2668914 - RNA, 19 nt, Homo sapiens
  misc_RNA (1)...(19): siRNA sense strand
caagcagauuauugcgaau

SEQ ID NO: 2668915 - RNA, 19 nt, Homo sapiens
  misc_RNA (1)...(19): siRNA sense strand
gagauuugucagagaacga

SEQ ID NO: 2668916 - RNA, 19 nt, Homo sapiens
  misc_RNA (1)...(19): siRNA sense strand
gaguauacgacugcaaaua

SEQ ID NO: 2668917 - RNA, 19 nt, Homo sapiens
  misc_RNA (1)...(19): siRNA sense strand
aacagaagcugaugcacaa

SEQ ID NO: 2668918 - RNA, 19 nt, Homo sapiens
  misc_RNA (1)...(19): siRNA sense strand
gggugagaaugacaagaau

SEQ ID NO: 2668919 - RNA, 19 nt, Homo sapiens
  misc_RNA (1)...(19): siRNA sense strand
agaaagaaaugguggucag

SEQ ID NO: 2668920 - RNA, 19 nt, Homo sapiens
  misc_RNA (1)...(19): siRNA sense strand
auaacaacauggacaguga

SEQ ID NO: 2668921 - RNA, 19 nt, Homo sapiens
  misc_RNA (1)...(19): siRNA sense strand
gugacaaaacagaggguga

SEQ ID NO: 2668922 - RNA, 19 nt, Homo sapiens
  misc_RNA (1)...(19): siRNA sense strand
gagacuuuauuuggagaaa

SEQ ID NO: 2668923 - RNA, 19 nt, Homo sapiens
  misc_RNA (1)...(19): siRNA sense strand
aaugcuaaggugagguuua

SEQ ID NO: 2668924 - RNA, 19 nt, Homo sapiens
  misc_RNA (1)...(19): siRNA sense strand
cugcagaucgauuaauuaa

SEQ ID NO: 2668925 - RNA, 19 nt, Homo sapiens
  misc_RNA (1)...(19): siRNA sense strand
ccgccacggaauugcgaaa

SEQ ID NO: 2668926 - RNA, 19 nt, Homo sapiens
  misc_RNA (1)...(19): siRNA sense strand
gggaagaugaggagcuuuu

SEQ ID NO: 2668927 - RNA, 19 nt, Homo sapiens
  misc_RNA (1)...(19): siRNA sense strand
aggggaaugcagugggaaa

SEQ ID NO: 2668928 - RNA, 19 nt, Homo sapiens
  misc_RNA (1)...(19): siRNA sense strand
aggugauacugaagcucua

SEQ ID NO: 2668929 - RNA, 19 nt, Homo sapiens
  misc_RNA (1)...(19): siRNA sense strand
gaaucaaagagaaguuuca

SEQ ID NO: 2668930 - RNA, 19 nt, Homo sapiens
  misc_RNA (1)...(19): siRNA sense strand
cauccugagguuagcauua

SEQ ID NO: 2668931 - RNA, 19 nt, Homo sapiens
  misc_RNA (1)...(19): siRNA sense strand
gcccaaaauggaagggaau

SEQ ID NO: 2668932 - RNA, 19 nt, Homo sapiens
  misc_RNA (1)...(19): siRNA sense strand
ucaaagaaggaaacgccaa

SEQ ID NO: 2668933 - RNA, 19 nt, Homo sapiens
  misc_RNA (1)...(19): siRNA sense strand
uguaagggcuuuugaguca

SEQ ID NO: 2668934 - RNA, 19 nt, Homo sapiens
  misc_RNA (1)...(19): siRNA sense strand
caaucacaacgguggcuaa

SEQ ID NO: 2668935 - RNA, 19 nt, Homo sapiens
  misc_RNA (1)...(19): siRNA sense strand
ccacaaugccagcgguuau

SEQ ID NO: 2668936 - RNA, 19 nt, Homo sapiens
  misc_RNA (1)...(19): siRNA sense strand
gcacaaagcaggaacccau

SEQ ID NO: 2668937 - RNA, 19 nt, Homo sapiens
  misc_RNA (1)...(19): siRNA sense strand
ccauaaaggacuuccaaaa

SEQ ID NO: 2668938 - RNA, 19 nt, Homo sapiens
  misc_RNA (1)...(19): siRNA sense strand
ccguagaacccaugaaguu

SEQ ID NO: 2668939 - RNA, 19 nt, Homo sapiens
  misc_RNA (1)...(19): siRNA sense strand
ccaaacacaaagagcggaa

SEQ ID NO: 2668940 - RNA, 19 nt, Homo sapiens
  misc_RNA (1)...(19): siRNA sense strand
ggucacgagaugagcgcua

SEQ ID NO: 2668941 - RNA, 19 nt, Homo sapiens
  misc_RNA (1)...(19): siRNA sense strand
acaucaaguuggaguuuau

SEQ ID NO: 2668942 - RNA, 19 nt, Homo sapiens
  misc_RNA (1)...(19): siRNA sense strand
gcgauuugcuugcagggaa

SEQ ID NO: 2668943 - RNA, 19 nt, Homo sapiens
  misc_RNA (1)...(19): siRNA sense strand
gcacaagagagcugagaag

SEQ ID NO: 2668944 - RNA, 19 nt, Homo sapiens
  misc_RNA (1)...(19): siRNA sense strand
acaagagagcugagaagau

SEQ ID NO: 2668945 - RNA, 19 nt, Homo sapiens
  misc_RNA (1)...(19): siRNA sense strand
ccucagagcacucgauaca

SEQ ID NO: 2668946 - RNA, 19 nt, Homo sapiens
  misc_RNA (1)...(19): siRNA sense strand
cauaaaagcguuacggaau

SEQ ID NO: 2668947 - RNA, 19 nt, Homo sapiens
  misc_RNA (1)...(19): siRNA sense strand
ccauaaaagcguuacggaa

SEQ ID NO: 2668948 - RNA, 19 nt, Homo sapiens
  misc_RNA (1)...(19): siRNA sense strand
cgauacagguggagagacc

SEQ ID NO: 2668949 - RNA, 19 nt, Homo sapiens
  misc_RNA (1)...(19): siRNA sense strand
cuuccaaaguaaaggccuu

SEQ ID NO: 2668950 - RNA, 19 nt, Homo sapiens
  misc_RNA (1)...(19): siRNA sense strand
ugucgaugacuuugaagaa

SEQ ID NO: 2668951 - RNA, 19 nt, Homo sapiens
  misc_RNA (1)...(19): siRNA sense strand
ucacagaugcaaauggaga

SEQ ID NO: 2668952 - RNA, 19 nt, Homo sapiens
  misc_RNA (1)...(19): siRNA sense strand
caauaacgacacugcguau

SEQ ID NO: 2668953 - RNA, 19 nt, Homo sapiens
  misc_RNA (1)...(19): siRNA sense strand
gugcagaacggaugagauc

SEQ ID NO: 2668954 - RNA, 19 nt, Homo sapiens
  misc_RNA (1)...(19): siRNA sense strand
ucgucuucguggugggcaa

SEQ ID NO: 2668955 - RNA, 19 nt, Homo sapiens
  misc_RNA (1)...(19): siRNA sense strand
caguuuaaagguuggccaa

SEQ ID NO: 2668956 - RNA, 19 nt, Homo sapiens
  misc_RNA (1)...(19): siRNA sense strand
acaugagagcccugagaca

SEQ ID NO: 2668957 - RNA, 19 nt, Homo sapiens
  misc_RNA (1)...(19): siRNA sense strand
uugccaacccagaaacaaa

SEQ ID NO: 2668958 - RNA, 19 nt, Homo sapiens
  misc_RNA (1)...(19): siRNA sense strand
ggucagacguccacacgga

SEQ ID NO: 2668959 - RNA, 19 nt, Homo sapiens
  misc_RNA (1)...(19): siRNA sense strand
uugugaaugugcuggauuu

SEQ ID NO: 2668960 - RNA, 19 nt, Homo sapiens
  misc_RNA (1)...(19): siRNA sense strand
cauuaguagcacacagaga

SEQ ID NO: 2668961 - RNA, 19 nt, Homo sapiens
  misc_RNA (1)...(19): siRNA sense strand
gcucagaagaugaaggcuc

SEQ ID NO: 2668962 - RNA, 19 nt, Homo sapiens
  misc_RNA (1)...(19): siRNA sense strand
cacagagaucagagagaca

SEQ ID NO: 2668963 - RNA, 19 nt, Homo sapiens
  misc_RNA (1)...(19): siRNA sense strand
gcguauauugaguacaaga

SEQ ID NO: 2668964 - RNA, 19 nt, Homo sapiens
  misc_RNA (1)...(19): siRNA sense strand
ccgacggucuucaggguca

SEQ ID NO: 2668965 - RNA, 19 nt, Homo sapiens
  misc_RNA (1)...(19): siRNA sense strand
aagcuguggacaagaagua

SEQ ID NO: 2668966 - RNA, 19 nt, Homo sapiens
  misc_RNA (1)...(19): siRNA sense strand
gguuugucacagagucuaa

SEQ ID NO: 2668967 - RNA, 19 nt, Homo sapiens
  misc_RNA (1)...(19): siRNA sense strand
ccucugugaugguggggaa

SEQ ID NO: 2668968 - RNA, 19 nt, Homo sapiens
  misc_RNA (1)...(19): siRNA sense strand
gcgugguuguggcggaaga

SEQ ID NO: 2668969 - RNA, 19 nt, Homo sapiens
  misc_RNA (1)...(19): siRNA sense strand
guguggacucggaagagaa

SEQ ID NO: 2668970 - RNA, 19 nt, Homo sapiens
  misc_RNA (1)...(19): siRNA sense strand
guacaaaguccgagacacg

SEQ ID NO: 2668971 - RNA, 19 nt, Homo sapiens
  misc_RNA (1)...(19): siRNA sense strand
cccugauggaaucgggaaa

SEQ ID NO: 2668972 - RNA, 19 nt, Homo sapiens
  misc_RNA (1)...(19): siRNA sense strand
ggucggaacaagaagccuu

SEQ ID NO: 2668973 - RNA, 19 nt, Homo sapiens
  misc_RNA (1)...(19): siRNA sense strand
acacauuaaagaugccaau

SEQ ID NO: 2668974 - RNA, 19 nt, Homo sapiens
  misc_RNA (1)...(19): siRNA sense strand
aaacacaaagagcggaaga

SEQ ID NO: 2668975 - RNA, 19 nt, Homo sapiens
  misc_RNA (1)...(19): siRNA sense strand
ggauggaguaccaguaagu

SEQ ID NO: 2668976 - RNA, 19 nt, Homo sapiens
  misc_RNA (1)...(19): siRNA sense strand
ccauggacaccaacgggaa

SEQ ID NO: 2668977 - RNA, 19 nt, Homo sapiens
  misc_RNA (1)...(19): siRNA sense strand
cucagaagaugaaggcuca

SEQ ID NO: 2668978 - RNA, 19 nt, Homo sapiens
  misc_RNA (1)...(19): siRNA sense strand
cgaccaccuuuacgagaau

SEQ ID NO: 2668979 - RNA, 19 nt, Homo sapiens
  misc_RNA (1)...(19): siRNA sense strand
agcugaaaccauugugaau

SEQ ID NO: 2668980 - RNA, 19 nt, Homo sapiens
  misc_RNA (1)...(19): siRNA sense strand
ggucaucagagcccauaaa

SEQ ID NO: 2668981 - RNA, 19 nt, Homo sapiens
  misc_RNA (1)...(19): siRNA sense strand
gagugguggucguggugga

SEQ ID NO: 2668982 - RNA, 19 nt, Homo sapiens
  misc_RNA (1)...(19): siRNA sense strand
gcaaaaguggcguguguga

SEQ ID NO: 2668983 - RNA, 19 nt, Homo sapiens
  misc_RNA (1)...(19): siRNA sense strand
uguuggugguugugguuga

SEQ ID NO: 2668984 - RNA, 19 nt, Homo sapiens
  misc_RNA (1)...(19): siRNA sense strand
cuacacaaauuaggcacaa

SEQ ID NO: 2668985 - RNA, 19 nt, Homo sapiens
  misc_RNA (1)...(19): siRNA sense strand
ggcccacggaugacaguaa

SEQ ID NO: 2668986 - RNA, 19 nt, Homo sapiens
  misc_RNA (1)...(19): siRNA sense strand
ccucuagagaaguggccau

SEQ ID NO: 2668987 - RNA, 19 nt, Homo sapiens
  misc_RNA (1)...(19): siRNA sense strand
augcaaauggagagcgcca

SEQ ID NO: 2668988 - RNA, 19 nt, Homo sapiens
  misc_RNA (1)...(19): siRNA sense strand
acacggaagcugaaaccau

SEQ ID NO: 2668989 - RNA, 19 nt, Homo sapiens
  misc_RNA (1)...(19): siRNA sense strand
aaaaguggcgugugugaaa

SEQ ID NO: 2668990 - RNA, 19 nt, Homo sapiens
  misc_RNA (1)...(19): siRNA sense strand
ggacaggcuugcugggguu

SEQ ID NO: 2668991 - RNA, 19 nt, Homo sapiens
  misc_RNA (1)...(19): siRNA sense strand
ccaucuauguggccuacaa

SEQ ID NO: 2668992 - RNA, 19 nt, Homo sapiens
  misc_RNA (1)...(19): siRNA sense strand
cgauuugcuugcagggaac

SEQ ID NO: 2668993 - RNA, 19 nt, Homo sapiens
  misc_RNA (1)...(19): siRNA sense strand
cacacagagaucagagaga

SEQ ID NO: 2668994 - RNA, 19 nt, Homo sapiens
  misc_RNA (1)...(19): siRNA sense strand
gauccauuuaucagaaaca

SEQ ID NO: 2668995 - RNA, 19 nt, Homo sapiens
  misc_RNA (1)...(19): siRNA sense strand
ccacaaugccagcgguuau

SEQ ID NO: 2668996 - RNA, 19 nt, Homo sapiens
  misc_RNA (1)...(19): siRNA sense strand
gcacaaagcaggaacccau

SEQ ID NO: 2668997 - RNA, 19 nt, Homo sapiens
  misc_RNA (1)...(19): siRNA sense strand
ccauaaaggacuuccaaaa

SEQ ID NO: 2668998 - RNA, 19 nt, Homo sapiens
  misc_RNA (1)...(19): siRNA sense strand
ccguagaacccaugaaguu

SEQ ID NO: 2668999 - RNA, 19 nt, Homo sapiens
  misc_RNA (1)...(19): siRNA sense strand
ccaaacacaaagagcggaa

SEQ ID NO: 2669000 - RNA, 19 nt, Homo sapiens
  misc_RNA (1)...(19): siRNA sense strand
ggucacgagaugagcgcua

SEQ ID NO: 2669001 - RNA, 19 nt, Homo sapiens
  misc_RNA (1)...(19): siRNA sense strand
acaucaaguuggaguuuau

SEQ ID NO: 2669002 - RNA, 19 nt, Homo sapiens
  misc_RNA (1)...(19): siRNA sense strand
gcgauuugcuugcagggaa

SEQ ID NO: 2669003 - RNA, 19 nt, Homo sapiens
  misc_RNA (1)...(19): siRNA sense strand
gcacaagagagcugagaag

SEQ ID NO: 2669004 - RNA, 19 nt, Homo sapiens
  misc_RNA (1)...(19): siRNA sense strand
acaagagagcugagaagau

SEQ ID NO: 2669005 - RNA, 19 nt, Homo sapiens
  misc_RNA (1)...(19): siRNA sense strand
ccucagagcacucgauaca

SEQ ID NO: 2669006 - RNA, 19 nt, Homo sapiens
  misc_RNA (1)...(19): siRNA sense strand
cauaaaagcguuacggaau

SEQ ID NO: 2669007 - RNA, 19 nt, Homo sapiens
  misc_RNA (1)...(19): siRNA sense strand
ccauaaaagcguuacggaa

SEQ ID NO: 2669008 - RNA, 19 nt, Homo sapiens
  misc_RNA (1)...(19): siRNA sense strand
cgauacagguggagagacc

SEQ ID NO: 2669009 - RNA, 19 nt, Homo sapiens
  misc_RNA (1)...(19): siRNA sense strand
cuuccaaaguaaaggccuu

SEQ ID NO: 2669010 - RNA, 19 nt, Homo sapiens
  misc_RNA (1)...(19): siRNA sense strand
ugucgaugacuuugaagaa

SEQ ID NO: 2669011 - RNA, 19 nt, Homo sapiens
  misc_RNA (1)...(19): siRNA sense strand
ucacagaugcaaauggaga

SEQ ID NO: 2669012 - RNA, 19 nt, Homo sapiens
  misc_RNA (1)...(19): siRNA sense strand
cgaacaaagaggaggccgu

SEQ ID NO: 2669013 - RNA, 19 nt, Homo sapiens
  misc_RNA (1)...(19): siRNA sense strand
caauaacgacacugcguau

SEQ ID NO: 2669014 - RNA, 19 nt, Homo sapiens
  misc_RNA (1)...(19): siRNA sense strand
gugcagaacggaugagauc

SEQ ID NO: 2669015 - RNA, 19 nt, Homo sapiens
  misc_RNA (1)...(19): siRNA sense strand
ucgucuucguggugggcaa

SEQ ID NO: 2669016 - RNA, 19 nt, Homo sapiens
  misc_RNA (1)...(19): siRNA sense strand
caguuuaaagguuggccaa

SEQ ID NO: 2669017 - RNA, 19 nt, Homo sapiens
  misc_RNA (1)...(19): siRNA sense strand
acaugagagcccugagaca

SEQ ID NO: 2669018 - RNA, 19 nt, Homo sapiens
  misc_RNA (1)...(19): siRNA sense strand
uugccaacccagaaacaaa

SEQ ID NO: 2669019 - RNA, 19 nt, Homo sapiens
  misc_RNA (1)...(19): siRNA sense strand
ggucagacguccacacgga

SEQ ID NO: 2669020 - RNA, 19 nt, Homo sapiens
  misc_RNA (1)...(19): siRNA sense strand
uugugaaugugcuggauuu

SEQ ID NO: 2669021 - RNA, 19 nt, Homo sapiens
  misc_RNA (1)...(19): siRNA sense strand
cauuaguagcacacagaga

SEQ ID NO: 2669022 - RNA, 19 nt, Homo sapiens
  misc_RNA (1)...(19): siRNA sense strand
gcucagaagaugaaggcuc

SEQ ID NO: 2669023 - RNA, 19 nt, Homo sapiens
  misc_RNA (1)...(19): siRNA sense strand
cacagagaucagagagaca

SEQ ID NO: 2669024 - RNA, 19 nt, Homo sapiens
  misc_RNA (1)...(19): siRNA sense strand
gcguauauugaguacaaga

SEQ ID NO: 2669025 - RNA, 19 nt, Homo sapiens
  misc_RNA (1)...(19): siRNA sense strand
ccgacggucuucaggguca

SEQ ID NO: 2669026 - RNA, 19 nt, Homo sapiens
  misc_RNA (1)...(19): siRNA sense strand
aagcuguggacaagaagua

SEQ ID NO: 2669027 - RNA, 19 nt, Homo sapiens
  misc_RNA (1)...(19): siRNA sense strand
gguuugucacagagucuaa

SEQ ID NO: 2669028 - RNA, 19 nt, Homo sapiens
  misc_RNA (1)...(19): siRNA sense strand
ccucugugaugguggggaa

SEQ ID NO: 2669029 - RNA, 19 nt, Homo sapiens
  misc_RNA (1)...(19): siRNA sense strand
gcgugguuguggcggaaga

SEQ ID NO: 2669030 - RNA, 19 nt, Homo sapiens
  misc_RNA (1)...(19): siRNA sense strand
guguggacucggaagagaa

SEQ ID NO: 2669031 - RNA, 19 nt, Homo sapiens
  misc_RNA (1)...(19): siRNA sense strand
guacaaaguccgagacacg

SEQ ID NO: 2669032 - RNA, 19 nt, Homo sapiens
  misc_RNA (1)...(19): siRNA sense strand
cccugauggaaucgggaaa

SEQ ID NO: 2669033 - RNA, 19 nt, Homo sapiens
  misc_RNA (1)...(19): siRNA sense strand
ggucggaacaagaagccuu

SEQ ID NO: 2669034 - RNA, 19 nt, Homo sapiens
  misc_RNA (1)...(19): siRNA sense strand
acacauuaaagaugccaau

SEQ ID NO: 2669035 - RNA, 19 nt, Homo sapiens
  misc_RNA (1)...(19): siRNA sense strand
aaacacaaagagcggaaga

SEQ ID NO: 2669036 - RNA, 19 nt, Homo sapiens
  misc_RNA (1)...(19): siRNA sense strand
ggauggaguaccaguaagu

SEQ ID NO: 2669037 - RNA, 19 nt, Homo sapiens
  misc_RNA (1)...(19): siRNA sense strand
ccauggacaccaacgggaa

SEQ ID NO: 2669038 - RNA, 19 nt, Homo sapiens
  misc_RNA (1)...(19): siRNA sense strand
cucagaagaugaaggcuca

SEQ ID NO: 2669039 - RNA, 19 nt, Homo sapiens
  misc_RNA (1)...(19): siRNA sense strand
cgaccaccuuuacgagaau

SEQ ID NO: 2669040 - RNA, 19 nt, Homo sapiens
  misc_RNA (1)...(19): siRNA sense strand
agcugaaaccauugugaau

SEQ ID NO: 2669041 - RNA, 19 nt, Homo sapiens
  misc_RNA (1)...(19): siRNA sense strand
ggucaucagagcccauaaa

SEQ ID NO: 2669042 - RNA, 19 nt, Homo sapiens
  misc_RNA (1)...(19): siRNA sense strand
gagugguggucguggugga

SEQ ID NO: 2669043 - RNA, 19 nt, Homo sapiens
  misc_RNA (1)...(19): siRNA sense strand
gcaaaaguggcguguguga

SEQ ID NO: 2669044 - RNA, 19 nt, Homo sapiens
  misc_RNA (1)...(19): siRNA sense strand
uguuggugguugugguuga

SEQ ID NO: 2669045 - RNA, 19 nt, Homo sapiens
  misc_RNA (1)...(19): siRNA sense strand
cuacacaaauuaggcacaa

SEQ ID NO: 2669046 - RNA, 19 nt, Homo sapiens
  misc_RNA (1)...(19): siRNA sense strand
ggcccacggaugacaguaa

SEQ ID NO: 2669047 - RNA, 19 nt, Homo sapiens
  misc_RNA (1)...(19): siRNA sense strand
ccucuagagaaguggccau

SEQ ID NO: 2669048 - RNA, 19 nt, Homo sapiens
  misc_RNA (1)...(19): siRNA sense strand
augcaaauggagagcgcca

SEQ ID NO: 2669049 - RNA, 19 nt, Homo sapiens
  misc_RNA (1)...(19): siRNA sense strand
acacggaagcugaaaccau

SEQ ID NO: 2669050 - RNA, 19 nt, Homo sapiens
  misc_RNA (1)...(19): siRNA sense strand
aaaaguggcgugugugaaa

SEQ ID NO: 2669051 - RNA, 19 nt, Homo sapiens
  misc_RNA (1)...(19): siRNA sense strand
ggacaggcuugcugggguu

SEQ ID NO: 2669052 - RNA, 19 nt, Homo sapiens
  misc_RNA (1)...(19): siRNA sense strand
cgauuugcuugcagggaac

SEQ ID NO: 2669053 - RNA, 19 nt, Homo sapiens
  misc_RNA (1)...(19): siRNA sense strand
cacacagagaucagagaga

SEQ ID NO: 2669054 - RNA, 19 nt, Homo sapiens
  misc_RNA (1)...(19): siRNA sense strand
gauccauuuaucagaaaca

SEQ ID NO: 2669055 - RNA, 19 nt, Homo sapiens
  misc_RNA (1)...(19): siRNA sense strand
ccuggaagacagagagcaa

SEQ ID NO: 2669056 - RNA, 19 nt, Homo sapiens
  misc_RNA (1)...(19): siRNA sense strand
gaacaaagauggcuggaac

SEQ ID NO: 2669057 - RNA, 19 nt, Homo sapiens
  misc_RNA (1)...(19): siRNA sense strand
gagcaaaauuagaaggacu

SEQ ID NO: 2669058 - RNA, 19 nt, Homo sapiens
  misc_RNA (1)...(19): siRNA sense strand
uggaagacagagagcaaaa

SEQ ID NO: 2669059 - RNA, 19 nt, Homo sapiens
  misc_RNA (1)...(19): siRNA sense strand
cuucuuaagaggugccaau

SEQ ID NO: 2669060 - RNA, 19 nt, Homo sapiens
  misc_RNA (1)...(19): siRNA sense strand
ccgccuugauggacgcaau

SEQ ID NO: 2669061 - RNA, 19 nt, Homo sapiens
  misc_RNA (1)...(19): siRNA sense strand
cgucgauguagaugugaga

SEQ ID NO: 2669062 - RNA, 19 nt, Homo sapiens
  misc_RNA (1)...(19): siRNA sense strand
ggcucuggccauagcgcaa

SEQ ID NO: 2669063 - RNA, 19 nt, Homo sapiens
  misc_RNA (1)...(19): siRNA sense strand
ggccaaauacagaggcaaa

SEQ ID NO: 2669064 - RNA, 19 nt, Homo sapiens
  misc_RNA (1)...(19): siRNA sense strand
ugaaauuggaaguggcuaa

SEQ ID NO: 2669065 - RNA, 19 nt, Homo sapiens
  misc_RNA (1)...(19): siRNA sense strand
aggaaggauugcagagcua

SEQ ID NO: 2669066 - RNA, 19 nt, Homo sapiens
  misc_RNA (1)...(19): siRNA sense strand
cuacaagccuggaagggua

SEQ ID NO: 2669067 - RNA, 19 nt, Homo sapiens
  misc_RNA (1)...(19): siRNA sense strand
ugaaaauguuggaggaaga

SEQ ID NO: 2669068 - RNA, 19 nt, Homo sapiens
  misc_RNA (1)...(19): siRNA sense strand
ucacaaaagaagagaaaga

SEQ ID NO: 2669069 - RNA, 19 nt, Homo sapiens
  misc_RNA (1)...(19): siRNA sense strand
ccuuauugaugcugccaaa

SEQ ID NO: 2669070 - RNA, 19 nt, Homo sapiens
  misc_RNA (1)...(19): siRNA sense strand
cgaaacaggaggaggagga

SEQ ID NO: 2669071 - RNA, 19 nt, Homo sapiens
  misc_RNA (1)...(19): siRNA sense strand
gcucaagcuuggaggaaac

SEQ ID NO: 2669072 - RNA, 19 nt, Homo sapiens
  misc_RNA (1)...(19): siRNA sense strand
uggaaguguuuaaggauca

SEQ ID NO: 2669073 - RNA, 19 nt, Homo sapiens
  misc_RNA (1)...(19): siRNA sense strand
acgcaaucaaagagaagua

SEQ ID NO: 2669074 - RNA, 19 nt, Homo sapiens
  misc_RNA (1)...(19): siRNA sense strand
gcggaggaagcgacggaaa

SEQ ID NO: 2669075 - RNA, 19 nt, Homo sapiens
  misc_RNA (1)...(19): siRNA sense strand
cggaggaagcgacggaaau

SEQ ID NO: 2669076 - RNA, 19 nt, Homo sapiens
  misc_RNA (1)...(19): siRNA sense strand
cuggaaggguauuaagaga

SEQ ID NO: 2669077 - RNA, 19 nt, Homo sapiens
  misc_RNA (1)...(19): siRNA sense strand
acacgaaacaggaggagga

SEQ ID NO: 2669078 - RNA, 19 nt, Homo sapiens
  misc_RNA (1)...(19): siRNA sense strand
ggucaaaaucguacggaca

SEQ ID NO: 2669079 - RNA, 19 nt, Homo sapiens
  misc_RNA (1)...(19): siRNA sense strand
uggaaauguacucuggaaa

SEQ ID NO: 2669080 - RNA, 19 nt, Homo sapiens
  misc_RNA (1)...(19): siRNA sense strand
gugaagaggaggacgcuga

SEQ ID NO: 2669081 - RNA, 19 nt, Homo sapiens
  misc_RNA (1)...(19): siRNA sense strand
aaauguuggaggaagauua

SEQ ID NO: 2669082 - RNA, 19 nt, Homo sapiens
  misc_RNA (1)...(19): siRNA sense strand
ggcucaagcuuggaggaaa

SEQ ID NO: 2669083 - RNA, 19 nt, Homo sapiens
  misc_RNA (1)...(19): siRNA sense strand
aaaucagcauucagagcaa

SEQ ID NO: 2669084 - RNA, 19 nt, Homo sapiens
  misc_RNA (1)...(19): siRNA sense strand
cgggaugaccagacggaca

SEQ ID NO: 2669085 - RNA, 19 nt, Homo sapiens
  misc_RNA (1)...(19): siRNA sense strand
aggaggaggaggagagacu

SEQ ID NO: 2669086 - RNA, 19 nt, Homo sapiens
  misc_RNA (1)...(19): siRNA sense strand
ccaagauauuucaggagca

SEQ ID NO: 2669087 - RNA, 19 nt, Homo sapiens
  misc_RNA (1)...(19): siRNA sense strand
agucgugcaaccagagaaa

SEQ ID NO: 2669088 - RNA, 19 nt, Homo sapiens
  misc_RNA (1)...(19): siRNA sense strand
acaccuauuacuauggaaa

SEQ ID NO: 2669089 - RNA, 19 nt, Homo sapiens
  misc_RNA (1)...(19): siRNA sense strand
guuggugucaagagaauaa

SEQ ID NO: 2669090 - RNA, 19 nt, Homo sapiens
  misc_RNA (1)...(19): siRNA sense strand
gaagagacgcugaaggcca

SEQ ID NO: 2669091 - RNA, 19 nt, Homo sapiens
  misc_RNA (1)...(19): siRNA sense strand
ggaggaaagugaagaggag

SEQ ID NO: 2669092 - RNA, 19 nt, Homo sapiens
  misc_RNA (1)...(19): siRNA sense strand
aggaaagugaagaggagga

SEQ ID NO: 2669093 - RNA, 19 nt, Homo sapiens
  misc_RNA (1)...(19): siRNA sense strand
ggggagaauauuuggaaga

SEQ ID NO: 2669094 - RNA, 19 nt, Homo sapiens
  misc_RNA (1)...(19): siRNA sense strand
uggaaguggcuaauaagaa

SEQ ID NO: 2669095 - RNA, 19 nt, Homo sapiens
  misc_RNA (1)...(19): siRNA sense strand
uggaaggguauuaagagaa

SEQ ID NO: 2669096 - RNA, 19 nt, Homo sapiens
  misc_RNA (1)...(19): siRNA sense strand
ugguuggugucaagagaau

SEQ ID NO: 2669097 - RNA, 19 nt, Homo sapiens
  misc_RNA (1)...(19): siRNA sense strand
cuuaauagaacuucaggau

SEQ ID NO: 2669098 - RNA, 19 nt, Homo sapiens
  misc_RNA (1)...(19): siRNA sense strand
gacugguucuggagagcaa

SEQ ID NO: 2669099 - RNA, 19 nt, Homo sapiens
  misc_RNA (1)...(19): siRNA sense strand
gagaauauuuggaagagac

SEQ ID NO: 2669100 - RNA, 19 nt, Homo sapiens
  misc_RNA (1)...(19): siRNA sense strand
ggauaguuagugugauuga

SEQ ID NO: 2669101 - RNA, 19 nt, Homo sapiens
  misc_RNA (1)...(19): siRNA sense strand
acguagucaucgcggauuu

SEQ ID NO: 2669102 - RNA, 19 nt, Homo sapiens
  misc_RNA (1)...(19): siRNA sense strand
aagagacgcugaaggccaa

SEQ ID NO: 2669103 - RNA, 19 nt, Homo sapiens
  misc_RNA (1)...(19): siRNA sense strand
caucugaccaagucgcaaa

SEQ ID NO: 2669104 - RNA, 19 nt, Homo sapiens
  misc_RNA (1)...(19): siRNA sense strand
caccagaucgagagaguca

SEQ ID NO: 2669105 - RNA, 19 nt, Homo sapiens
  misc_RNA (1)...(19): siRNA sense strand
ccagaucgagagagucaaa

SEQ ID NO: 2669106 - RNA, 19 nt, Homo sapiens
  misc_RNA (1)...(19): siRNA sense strand
acaugaaacuugaagcugu

SEQ ID NO: 2669107 - RNA, 19 nt, Homo sapiens
  misc_RNA (1)...(19): siRNA sense strand
ccugaacaaaggaaggauu

SEQ ID NO: 2669108 - RNA, 19 nt, Homo sapiens
  misc_RNA (1)...(19): siRNA sense strand
ggaaaagugucucggcuca

SEQ ID NO: 2669109 - RNA, 19 nt, Homo sapiens
  misc_RNA (1)...(19): siRNA sense strand
gcaggauauugacggccaa

SEQ ID NO: 2669110 - RNA, 19 nt, Homo sapiens
  misc_RNA (1)...(19): siRNA sense strand
aggagugcauggagcugaa

SEQ ID NO: 2669111 - RNA, 19 nt, Homo sapiens
  misc_RNA (1)...(19): siRNA sense strand
caggaaugaaauuggaagu

SEQ ID NO: 2669112 - RNA, 19 nt, Homo sapiens
  misc_RNA (1)...(19): siRNA sense strand
agucgagguuucacaaaga

SEQ ID NO: 2669113 - RNA, 19 nt, Homo sapiens
  misc_RNA (1)...(19): siRNA sense strand
auggaaagagaaagaagau

SEQ ID NO: 2669114 - RNA, 19 nt, Homo sapiens
  misc_RNA (1)...(19): siRNA sense strand
gggaggaaagugaagagga

SEQ ID NO: 2669115 - RNA, 19 nt, Homo sapiens
  misc_RNA (1)...(19): siRNA sense strand
gguggugcacacagaacaa

SEQ ID NO: 2669116 - RNA, 19 nt, Homo sapiens
  misc_RNA (1)...(19): siRNA sense strand
gauugaaaauguuggagga

SEQ ID NO: 2669117 - RNA, 19 nt, Homo sapiens
  misc_RNA (1)...(19): siRNA sense strand
guuuaaggaucacgcagau

SEQ ID NO: 2669118 - RNA, 19 nt, Homo sapiens
  misc_RNA (1)...(19): siRNA sense strand
ccauuuucgugcagaagaa

SEQ ID NO: 2669119 - RNA, 19 nt, Homo sapiens
  misc_RNA (1)...(19): siRNA sense strand
ucgugcaaccagagaaaca

SEQ ID NO: 2669120 - RNA, 19 nt, Homo sapiens
  misc_RNA (1)...(19): siRNA sense strand
agaauauuuggaagagaca

SEQ ID NO: 2669121 - RNA, 19 nt, Homo sapiens
  misc_RNA (1)...(19): siRNA sense strand
agcuugagacagugaauau

SEQ ID NO: 2669122 - RNA, 19 nt, Homo sapiens
  misc_RNA (1)...(19): siRNA sense strand
gugccaagcuagagugcug

SEQ ID NO: 2669123 - RNA, 19 nt, Homo sapiens
  misc_RNA (1)...(19): siRNA sense strand
aagcuagagugcuguccaa

SEQ ID NO: 2669124 - RNA, 19 nt, Homo sapiens
  misc_RNA (1)...(19): siRNA sense strand
ccaaagagcuggaaggaac

SEQ ID NO: 2669125 - RNA, 19 nt, Homo sapiens
  misc_RNA (1)...(19): siRNA sense strand
cuugcaaggaagaggauaa

SEQ ID NO: 2669126 - RNA, 19 nt, Homo sapiens
  misc_RNA (1)...(19): siRNA sense strand
ggaacagagugguagcgaa

SEQ ID NO: 2669127 - RNA, 19 nt, Homo sapiens
  misc_RNA (1)...(19): siRNA sense strand
aggaagaggaagacgauga

SEQ ID NO: 2669128 - RNA, 19 nt, Homo sapiens
  misc_RNA (1)...(19): siRNA sense strand
uagaaagacuacaggcuga

SEQ ID NO: 2669129 - RNA, 19 nt, Homo sapiens
  misc_RNA (1)...(19): siRNA sense strand
cggaaauggaacaggaaac

SEQ ID NO: 2669130 - RNA, 19 nt, Homo sapiens
  misc_RNA (1)...(19): siRNA sense strand
aggaagacgaugaugauga

SEQ ID NO: 2669131 - RNA, 19 nt, Homo sapiens
  misc_RNA (1)...(19): siRNA sense strand
cggcuuuggcucagaugaa

SEQ ID NO: 2669132 - RNA, 19 nt, Homo sapiens
  misc_RNA (1)...(19): siRNA sense strand
ugaugaugaccaaggagaa

SEQ ID NO: 2669133 - RNA, 19 nt, Homo sapiens
  misc_RNA (1)...(19): siRNA sense strand
uggaaggaacggaaguaau

SEQ ID NO: 2669134 - RNA, 19 nt, Homo sapiens
  misc_RNA (1)...(19): siRNA sense strand
cccacgaggaagaggaaga

SEQ ID NO: 2669135 - RNA, 19 nt, Homo sapiens
  misc_RNA (1)...(19): siRNA sense strand
cuauggaaagagaaggcua

SEQ ID NO: 2669136 - RNA, 19 nt, Homo sapiens
  misc_RNA (1)...(19): siRNA sense strand
ucuggaaggcggugaccaa

SEQ ID NO: 2669137 - RNA, 19 nt, Homo sapiens
  misc_RNA (1)...(19): siRNA sense strand
ugcgaggauuagacggaaa

SEQ ID NO: 2669138 - RNA, 19 nt, Homo sapiens
  misc_RNA (1)...(19): siRNA sense strand
ugaucagcagcuugagaua

SEQ ID NO: 2669139 - RNA, 19 nt, Homo sapiens
  misc_RNA (1)...(19): siRNA sense strand
ccugagaacaccagcuaca

SEQ ID NO: 2669140 - RNA, 19 nt, Homo sapiens
  misc_RNA (1)...(19): siRNA sense strand
aagaaaagccccuggcaga

SEQ ID NO: 2669141 - RNA, 19 nt, Homo sapiens
  misc_RNA (1)...(19): siRNA sense strand
uugaaaagcaggacagaga

SEQ ID NO: 2669142 - RNA, 19 nt, Homo sapiens
  misc_RNA (1)...(19): siRNA sense strand
cucuaaugguauaugaaga

SEQ ID NO: 2669143 - RNA, 19 nt, Homo sapiens
  misc_RNA (1)...(19): siRNA sense strand
acggaaauggaacaggaaa

SEQ ID NO: 2669144 - RNA, 19 nt, Homo sapiens
  misc_RNA (1)...(19): siRNA sense strand
ggaaacagcaccaggcaug

SEQ ID NO: 2669145 - RNA, 19 nt, Homo sapiens
  misc_RNA (1)...(19): siRNA sense strand
uauuauugcaggaggaagu

SEQ ID NO: 2669146 - RNA, 19 nt, Homo sapiens
  misc_RNA (1)...(19): siRNA sense strand
gcuugagauagaaagacua

SEQ ID NO: 2669147 - RNA, 19 nt, Homo sapiens
  misc_RNA (1)...(19): siRNA sense strand
aagaggaagacgaugauga

SEQ ID NO: 2669148 - RNA, 19 nt, Homo sapiens
  misc_RNA (1)...(19): siRNA sense strand
gcgaggauuagacggaaau

SEQ ID NO: 2669149 - RNA, 19 nt, Homo sapiens
  misc_RNA (1)...(19): siRNA sense strand
uuauauuauugcaggagga

SEQ ID NO: 2669150 - RNA, 19 nt, Homo sapiens
  misc_RNA (1)...(19): siRNA sense strand
aaugaugacuacaggggua

SEQ ID NO: 2669151 - RNA, 19 nt, Homo sapiens
  misc_RNA (1)...(19): siRNA sense strand
cagcagcuugagauagaaa

SEQ ID NO: 2669152 - RNA, 19 nt, Homo sapiens
  misc_RNA (1)...(19): siRNA sense strand
gcagcuugagauagaaaga

SEQ ID NO: 2669153 - RNA, 19 nt, Homo sapiens
  misc_RNA (1)...(19): siRNA sense strand
agacggaaauggaacagga

SEQ ID NO: 2669154 - RNA, 19 nt, Homo sapiens
  misc_RNA (1)...(19): siRNA sense strand
cggaaguaaugaugccagu

SEQ ID NO: 2669155 - RNA, 19 nt, Homo sapiens
  misc_RNA (1)...(19): siRNA sense strand
uccaaauaguaucaggauu

SEQ ID NO: 2669156 - RNA, 19 nt, Homo sapiens
  misc_RNA (1)...(19): siRNA sense strand
cgaaggaacugaugagugg

SEQ ID NO: 2669157 - RNA, 19 nt, Homo sapiens
  misc_RNA (1)...(19): siRNA sense strand
ggaaaguacugccugccuu

SEQ ID NO: 2669158 - RNA, 19 nt, Homo sapiens
  misc_RNA (1)...(19): siRNA sense strand
cguuaaaggugcacaucag

SEQ ID NO: 2669159 - RNA, 19 nt, Homo sapiens
  misc_RNA (1)...(19): siRNA sense strand
ggaacaggaaacagcacca

SEQ ID NO: 2669160 - RNA, 19 nt, Homo sapiens
  misc_RNA (1)...(19): siRNA sense strand
augacagcguuuacaggaa

SEQ ID NO: 2669161 - RNA, 19 nt, Homo sapiens
  misc_RNA (1)...(19): siRNA sense strand
aaaucagcccggaagggaa

SEQ ID NO: 2669162 - RNA, 19 nt, Homo sapiens
  misc_RNA (1)...(19): siRNA sense strand
acgaggaagaggaagacga

SEQ ID NO: 2669163 - RNA, 19 nt, Homo sapiens
  misc_RNA (1)...(19): siRNA sense strand
cagauaagcaucagguaau

SEQ ID NO: 2669164 - RNA, 19 nt, Homo sapiens
  misc_RNA (1)...(19): siRNA sense strand
acaccuuccuccagagaaa

SEQ ID NO: 2669165 - RNA, 19 nt, Homo sapiens
  misc_RNA (1)...(19): siRNA sense strand
uugaacuacuacagagaaa

SEQ ID NO: 2669166 - RNA, 19 nt, Homo sapiens
  misc_RNA (1)...(19): siRNA sense strand
cagaaagaucagaguuaau

SEQ ID NO: 2669167 - RNA, 19 nt, Homo sapiens
  misc_RNA (1)...(19): siRNA sense strand
gcucauaauaaaugcaaga

SEQ ID NO: 2669168 - RNA, 19 nt, Homo sapiens
  misc_RNA (1)...(19): siRNA sense strand
guuuggagcaacagugaaa

SEQ ID NO: 2669169 - RNA, 19 nt, Homo sapiens
  misc_RNA (1)...(19): siRNA sense strand
ccuuugaaguuaagaagau

SEQ ID NO: 2669170 - RNA, 19 nt, Homo sapiens
  misc_RNA (1)...(19): siRNA sense strand
ggguaauaauacuagcaau

SEQ ID NO: 2669171 - RNA, 19 nt, Homo sapiens
  misc_RNA (1)...(19): siRNA sense strand
aacagaaagaucagaguua

SEQ ID NO: 2669172 - RNA, 19 nt, Homo sapiens
  misc_RNA (1)...(19): siRNA sense strand
ccagagaaguagggcaaau

SEQ ID NO: 2669173 - RNA, 19 nt, Homo sapiens
  misc_RNA (1)...(19): siRNA sense strand
ggacaugaccgacagggaa

SEQ ID NO: 2669174 - RNA, 19 nt, Homo sapiens
  misc_RNA (1)...(19): siRNA sense strand
aagaauugguugcuggaau

SEQ ID NO: 2669175 - RNA, 19 nt, Homo sapiens
  misc_RNA (1)...(19): siRNA sense strand
cagaguuaauggaaccaaa

SEQ ID NO: 2669176 - RNA, 19 nt, Homo sapiens
  misc_RNA (1)...(19): siRNA sense strand
cuuuauggaacgugaauuu

SEQ ID NO: 2669177 - RNA, 19 nt, Homo sapiens
  misc_RNA (1)...(19): siRNA sense strand
auucagacauagacaagaa

SEQ ID NO: 2669178 - RNA, 19 nt, Homo sapiens
  misc_RNA (1)...(19): siRNA sense strand
ggacuguggagaagacaau

SEQ ID NO: 2669179 - RNA, 19 nt, Homo sapiens
  misc_RNA (1)...(19): siRNA sense strand
caggaaacuggcaggagaa

SEQ ID NO: 2669180 - RNA, 19 nt, Homo sapiens
  misc_RNA (1)...(19): siRNA sense strand
aucauuaacucuacggaua

SEQ ID NO: 2669181 - RNA, 19 nt, Homo sapiens
  misc_RNA (1)...(19): siRNA sense strand
ugugaguacaagauggaaa

SEQ ID NO: 2669182 - RNA, 19 nt, Homo sapiens
  misc_RNA (1)...(19): siRNA sense strand
aggacaauccagacagcaa

SEQ ID NO: 2669183 - RNA, 19 nt, Homo sapiens
  misc_RNA (1)...(19): siRNA sense strand
uuauaagaauggagaccuu

SEQ ID NO: 2669184 - RNA, 19 nt, Homo sapiens
  misc_RNA (1)...(19): siRNA sense strand
cagacauagacaagaauga

SEQ ID NO: 2669185 - RNA, 19 nt, Homo sapiens
  misc_RNA (1)...(19): siRNA sense strand
caaggaucaaagaggcaaa

SEQ ID NO: 2669186 - RNA, 19 nt, Homo sapiens
  misc_RNA (1)...(19): siRNA sense strand
cuuccuaugaugacaguua

SEQ ID NO: 2669187 - RNA, 19 nt, Homo sapiens
  misc_RNA (1)...(19): siRNA sense strand
ccaaguaccaucagugaca

SEQ ID NO: 2669188 - RNA, 19 nt, Homo sapiens
  misc_RNA (1)...(19): siRNA sense strand
acagggaacagcugacaaa

SEQ ID NO: 2669189 - RNA, 19 nt, Homo sapiens
  misc_RNA (1)...(19): siRNA sense strand
aaucagugguuuggagcaa

SEQ ID NO: 2669190 - RNA, 19 nt, Homo sapiens
  misc_RNA (1)...(19): siRNA sense strand
aacgugaauuugagagcaa

SEQ ID NO: 2669191 - RNA, 19 nt, Homo sapiens
  misc_RNA (1)...(19): siRNA sense strand
gggagauucgguagugcua

SEQ ID NO: 2669192 - RNA, 19 nt, Homo sapiens
  misc_RNA (1)...(19): siRNA sense strand
caauagucuugauggcaga

SEQ ID NO: 2669193 - RNA, 19 nt, Homo sapiens
  misc_RNA (1)...(19): siRNA sense strand
gagaaguagggcaaaucua

SEQ ID NO: 2669194 - RNA, 19 nt, Homo sapiens
  misc_RNA (1)...(19): siRNA sense strand
ucaggaaacuggcaggaga

SEQ ID NO: 2669195 - RNA, 19 nt, Homo sapiens
  misc_RNA (1)...(19): siRNA sense strand
ugcaagaaaugaaggggaa

SEQ ID NO: 2669196 - RNA, 19 nt, Homo sapiens
  misc_RNA (1)...(19): siRNA sense strand
cguuuaccuucgagaugaa

SEQ ID NO: 2669197 - RNA, 19 nt, Homo sapiens
  misc_RNA (1)...(19): siRNA sense strand
gugaguacaagauggaaaa

SEQ ID NO: 2669198 - RNA, 19 nt, Homo sapiens
  misc_RNA (1)...(19): siRNA sense strand
ccuuuauaucacuggagaa

SEQ ID NO: 2669199 - RNA, 19 nt, Homo sapiens
  misc_RNA (1)...(19): siRNA sense strand
gagcaaccccagagaagua

SEQ ID NO: 2669200 - RNA, 19 nt, Homo sapiens
  misc_RNA (1)...(19): siRNA sense strand
ggaacaaagauggcuuaaa

SEQ ID NO: 2669201 - RNA, 19 nt, Homo sapiens
  misc_RNA (1)...(19): siRNA sense strand
aacugaauuccgagauaaa

SEQ ID NO: 2669202 - RNA, 19 nt, Homo sapiens
  misc_RNA (1)...(19): siRNA sense strand
cggauuuggcuuuacuuua

SEQ ID NO: 2669203 - RNA, 19 nt, Homo sapiens
  misc_RNA (1)...(19): siRNA sense strand
gagcacagaauuuuggaua

SEQ ID NO: 2669204 - RNA, 19 nt, Homo sapiens
  misc_RNA (1)...(19): siRNA sense strand
ccccagagaaguagggcaa

SEQ ID NO: 2669205 - RNA, 19 nt, Homo sapiens
  misc_RNA (1)...(19): siRNA sense strand
gagaaagcgcaguccugaa

SEQ ID NO: 2669206 - RNA, 19 nt, Homo sapiens
  misc_RNA (1)...(19): siRNA sense strand
aauuagauucccugaaaca

SEQ ID NO: 2669207 - RNA, 19 nt, Homo sapiens
  misc_RNA (1)...(19): siRNA sense strand
caacaagggauuucgacca

SEQ ID NO: 2669208 - RNA, 19 nt, Homo sapiens
  misc_RNA (1)...(19): siRNA sense strand
gaucagaguuaauggaacc

SEQ ID NO: 2669209 - RNA, 19 nt, Homo sapiens
  misc_RNA (1)...(19): siRNA sense strand
gagaaaagcagacggaagu

SEQ ID NO: 2669210 - RNA, 19 nt, Homo sapiens
  misc_RNA (1)...(19): siRNA sense strand
aagaaugauuacccagauu

SEQ ID NO: 2669211 - RNA, 19 nt, Homo sapiens
  misc_RNA (1)...(19): siRNA sense strand
ggacaauccagacagcaau

SEQ ID NO: 2669212 - RNA, 19 nt, Homo sapiens
  misc_RNA (1)...(19): siRNA sense strand
ggagaaaagcagacggaag

SEQ ID NO: 2669213 - RNA, 19 nt, Homo sapiens
  misc_RNA (1)...(19): siRNA sense strand
gaggagauucagacauaga

SEQ ID NO: 2669214 - RNA, 19 nt, Homo sapiens
  misc_RNA (1)...(19): siRNA sense strand
ccacaaagaggaggagguu

SEQ ID NO: 2669215 - RNA, 19 nt, Homo sapiens
  misc_RNA (1)...(19): siRNA sense strand
gugcauuuggaacaggaaa

SEQ ID NO: 2669216 - RNA, 19 nt, Homo sapiens
  misc_RNA (1)...(19): siRNA sense strand
guuccagacucuaugacau

SEQ ID NO: 2669217 - RNA, 19 nt, Homo sapiens
  misc_RNA (1)...(19): siRNA sense strand
cuuuaaagaaggccuggaa

SEQ ID NO: 2669218 - RNA, 19 nt, Homo sapiens
  misc_RNA (1)...(19): siRNA sense strand
uuaaagaaggccuggaagu

SEQ ID NO: 2669219 - RNA, 19 nt, Homo sapiens
  misc_RNA (1)...(19): siRNA sense strand
accugaaccaagauggaua

SEQ ID NO: 2669220 - RNA, 19 nt, Homo sapiens
  misc_RNA (1)...(19): siRNA sense strand
gggauguacauguggucga

SEQ ID NO: 2669221 - RNA, 19 nt, Homo sapiens
  misc_RNA (1)...(19): siRNA sense strand
cagacagagcccugcaaaa

SEQ ID NO: 2669222 - RNA, 19 nt, Homo sapiens
  misc_RNA (1)...(19): siRNA sense strand
uccaagaggagcacagaau

SEQ ID NO: 2669223 - RNA, 19 nt, Homo sapiens
  misc_RNA (1)...(19): siRNA sense strand
aaauaaaacuugccagguu

SEQ ID NO: 2669224 - RNA, 19 nt, Homo sapiens
  misc_RNA (1)...(19): siRNA sense strand
gcacauaucugaaugagaa

SEQ ID NO: 2669225 - RNA, 19 nt, Homo sapiens
  misc_RNA (1)...(19): siRNA sense strand
acgaaaggguauucagaga

SEQ ID NO: 2669226 - RNA, 19 nt, Homo sapiens
  misc_RNA (1)...(19): siRNA sense strand
uaacaaaacgaaaggguau

SEQ ID NO: 2669227 - RNA, 19 nt, Homo sapiens
  misc_RNA (1)...(19): siRNA sense strand
uaguaaagauguuggcagu

SEQ ID NO: 2669228 - RNA, 19 nt, Homo sapiens
  misc_RNA (1)...(19): siRNA sense strand
cugaaauaugggaacuuaa

SEQ ID NO: 2669229 - RNA, 19 nt, Homo sapiens
  misc_RNA (1)...(19): siRNA sense strand
cgaaaggguauucagagaa

SEQ ID NO: 2669230 - RNA, 19 nt, Homo sapiens
  misc_RNA (1)...(19): siRNA sense strand
cucgaagagucuaaagcaa

SEQ ID NO: 2669231 - RNA, 19 nt, Homo sapiens
  misc_RNA (1)...(19): siRNA sense strand
gcaaaugugaagucgccua

SEQ ID NO: 2669232 - RNA, 19 nt, Homo sapiens
  misc_RNA (1)...(19): siRNA sense strand
acuauaaauccaagcauca

SEQ ID NO: 2669233 - RNA, 19 nt, Homo sapiens
  misc_RNA (1)...(19): siRNA sense strand
ucucuguggaacugaaaua

SEQ ID NO: 2669234 - RNA, 19 nt, Homo sapiens
  misc_RNA (1)...(19): siRNA sense strand
cccuauuucuggaggacau

SEQ ID NO: 2669235 - RNA, 19 nt, Homo sapiens
  misc_RNA (1)...(19): siRNA sense strand
gcauugagucuuucucuaa

SEQ ID NO: 2669236 - RNA, 19 nt, Homo sapiens
  misc_RNA (1)...(19): siRNA sense strand
cccaaagaauacagccaga

SEQ ID NO: 2669237 - RNA, 19 nt, Homo sapiens
  misc_RNA (1)...(19): siRNA sense strand
aggagauguuaguaaagau

SEQ ID NO: 2669238 - RNA, 19 nt, Homo sapiens
  misc_RNA (1)...(19): siRNA sense strand
ggauucugguggaggaaag

SEQ ID NO: 2669239 - RNA, 19 nt, Homo sapiens
  misc_RNA (1)...(19): siRNA sense strand
augggaacuuaaaggaaaa

SEQ ID NO: 2669240 - RNA, 19 nt, Homo sapiens
  misc_RNA (1)...(19): siRNA sense strand
auggaaacggcaagcagaa

SEQ ID NO: 2669241 - RNA, 19 nt, Homo sapiens
  misc_RNA (1)...(19): siRNA sense strand
gaaaggguauucagagaac

SEQ ID NO: 2669242 - RNA, 19 nt, Homo sapiens
  misc_RNA (1)...(19): siRNA sense strand
agugugcaguggucggaaa

SEQ ID NO: 2669243 - RNA, 19 nt, Homo sapiens
  misc_RNA (1)...(19): siRNA sense strand
gguauucagagaacgacua

SEQ ID NO: 2669244 - RNA, 19 nt, Homo sapiens
  misc_RNA (1)...(19): siRNA sense strand
agcagaagaauaugcaaau

SEQ ID NO: 2669245 - RNA, 19 nt, Homo sapiens
  misc_RNA (1)...(19): siRNA sense strand
cuaacaaaacgaaagggua

SEQ ID NO: 2669246 - RNA, 19 nt, Homo sapiens
  misc_RNA (1)...(19): siRNA sense strand
aaguaaagaugcagaggaa

SEQ ID NO: 2669247 - RNA, 19 nt, Homo sapiens
  misc_RNA (1)...(19): siRNA sense strand
cgaacaagaagaaggacaa

SEQ ID NO: 2669248 - RNA, 19 nt, Homo sapiens
  misc_RNA (1)...(19): siRNA sense strand
ucaagaagaagaagaagaa

SEQ ID NO: 2669249 - RNA, 19 nt, Homo sapiens
  misc_RNA (1)...(19): siRNA sense strand
cagaagagaugcagugguu

SEQ ID NO: 2669250 - RNA, 19 nt, Homo sapiens
  misc_RNA (1)...(19): siRNA sense strand
gcgaacaagaagaaggaca

SEQ ID NO: 2669251 - RNA, 19 nt, Homo sapiens
  misc_RNA (1)...(19): siRNA sense strand
gaacaauguacuucaguuu

SEQ ID NO: 2669252 - RNA, 19 nt, Homo sapiens
  misc_RNA (1)...(19): siRNA sense strand
augaauuggaggaggaaga

SEQ ID NO: 2669253 - RNA, 19 nt, Homo sapiens
  misc_RNA (1)...(19): siRNA sense strand
gguuguacguaaagcaaaa

SEQ ID NO: 2669254 - RNA, 19 nt, Homo sapiens
  misc_RNA (1)...(19): siRNA sense strand
guaaagaugcagaggaaag

SEQ ID NO: 2669255 - RNA, 19 nt, Homo sapiens
  misc_RNA (1)...(19): siRNA sense strand
gaucggaaucugaaggaga

SEQ ID NO: 2669256 - RNA, 19 nt, Homo sapiens
  misc_RNA (1)...(19): siRNA sense strand
augagaauuuccugggcaa

SEQ ID NO: 2669257 - RNA, 19 nt, Homo sapiens
  misc_RNA (1)...(19): siRNA sense strand
cgucauuuccuguuagcaa

SEQ ID NO: 2669258 - RNA, 19 nt, Homo sapiens
  misc_RNA (1)...(19): siRNA sense strand
acaagguguaugaggagaa

SEQ ID NO: 2669259 - RNA, 19 nt, Homo sapiens
  misc_RNA (1)...(19): siRNA sense strand
aggcugugguagcagauaa

SEQ ID NO: 2669260 - RNA, 19 nt, Homo sapiens
  misc_RNA (1)...(19): siRNA sense strand
gaacaagaagaaggacaaa

SEQ ID NO: 2669261 - RNA, 19 nt, Homo sapiens
  misc_RNA (1)...(19): siRNA sense strand
cucaagaagaagaagaaga

SEQ ID NO: 2669262 - RNA, 19 nt, Homo sapiens
  misc_RNA (1)...(19): siRNA sense strand
augaugaauuggaggagga

SEQ ID NO: 2669263 - RNA, 19 nt, Homo sapiens
  misc_RNA (1)...(19): siRNA sense strand
gguaaaacaaauacagaca

SEQ ID NO: 2669264 - RNA, 19 nt, Homo sapiens
  misc_RNA (1)...(19): siRNA sense strand
aagaagaagaagaagagca

SEQ ID NO: 2669265 - RNA, 19 nt, Homo sapiens
  misc_RNA (1)...(19): siRNA sense strand
aauuggaggaggaagaaau

SEQ ID NO: 2669266 - RNA, 19 nt, Homo sapiens
  misc_RNA (1)...(19): siRNA sense strand
uacaugaacuagaagacua

SEQ ID NO: 2669267 - RNA, 19 nt, Homo sapiens
  misc_RNA (1)...(19): siRNA sense strand
aagaugcagaggaaagaaa

SEQ ID NO: 2669268 - RNA, 19 nt, Homo sapiens
  misc_RNA (1)...(19): siRNA sense strand
gcaccuacgugauccgaga

SEQ ID NO: 2669269 - RNA, 19 nt, Homo sapiens
  misc_RNA (1)...(19): siRNA sense strand
ggaugauguuggugaagcu

SEQ ID NO: 2669270 - RNA, 19 nt, Homo sapiens
  misc_RNA (1)...(19): siRNA sense strand
uggaggaggaagaaauuau

SEQ ID NO: 2669271 - RNA, 19 nt, Homo sapiens
  misc_RNA (1)...(19): siRNA sense strand
ccuuggaagaagaugauga

SEQ ID NO: 2669272 - RNA, 19 nt, Homo sapiens
  misc_RNA (1)...(19): siRNA sense strand
cuccaggacagaagacuaa

SEQ ID NO: 2669273 - RNA, 19 nt, Homo sapiens
  misc_RNA (1)...(19): siRNA sense strand
uccucaaccuggaaguaaa

SEQ ID NO: 2669274 - RNA, 19 nt, Homo sapiens
  misc_RNA (1)...(19): siRNA sense strand
gcacaucagcagaagccau

SEQ ID NO: 2669275 - RNA, 19 nt, Homo sapiens
  misc_RNA (1)...(19): siRNA sense strand
gggcaagagaccacuggau

SEQ ID NO: 2669276 - RNA, 19 nt, Homo sapiens
  misc_RNA (1)...(19): siRNA sense strand
ggcugugguagcagauaaa

SEQ ID NO: 2669277 - RNA, 19 nt, Homo sapiens
  misc_RNA (1)...(19): siRNA sense strand
gagccugugcugagcgaga

SEQ ID NO: 2669278 - RNA, 19 nt, Homo sapiens
  misc_RNA (1)...(19): siRNA sense strand
gaagagaugcagugguucu

SEQ ID NO: 2669279 - RNA, 19 nt, Homo sapiens
  misc_RNA (1)...(19): siRNA sense strand
acaugaacuagaagacuau

SEQ ID NO: 2669280 - RNA, 19 nt, Homo sapiens
  misc_RNA (1)...(19): siRNA sense strand
acaaaugccaacugcaaaa

SEQ ID NO: 2669281 - RNA, 19 nt, Homo sapiens
  misc_RNA (1)...(19): siRNA sense strand
uuuacuagcccuaagagaa

SEQ ID NO: 2669282 - RNA, 19 nt, Homo sapiens
  misc_RNA (1)...(19): siRNA sense strand
gugcugagcgagagccaga

SEQ ID NO: 2669283 - RNA, 19 nt, Homo sapiens
  misc_RNA (1)...(19): siRNA sense strand
ucgcagaacaggccgaaga

SEQ ID NO: 2669284 - RNA, 19 nt, Homo sapiens
  misc_RNA (1)...(19): siRNA sense strand
aagaagaagaagagcaggu

SEQ ID NO: 2669285 - RNA, 19 nt, Homo sapiens
  misc_RNA (1)...(19): siRNA sense strand
cagaagacuaaaucaccua

SEQ ID NO: 2669286 - RNA, 19 nt, Homo sapiens
  misc_RNA (1)...(19): siRNA sense strand
ccaguuauccccagauuaa

SEQ ID NO: 2669287 - RNA, 19 nt, Homo sapiens
  misc_RNA (1)...(19): siRNA sense strand
cagaggaaagaaaagaaua

SEQ ID NO: 2669288 - RNA, 19 nt, Homo sapiens
  misc_RNA (1)...(19): siRNA sense strand
cuuggaagaagaugaugaa

SEQ ID NO: 2669289 - RNA, 19 nt, Homo sapiens
  misc_RNA (1)...(19): siRNA sense strand
cugaagaacugccagccau

SEQ ID NO: 2669290 - RNA, 19 nt, Homo sapiens
  misc_RNA (1)...(19): siRNA sense strand
agauaaaaguggaaccagu

SEQ ID NO: 2669291 - RNA, 19 nt, Homo sapiens
  misc_RNA (1)...(19): siRNA sense strand
ccaagugugcgaacaagaa

SEQ ID NO: 2669292 - RNA, 19 nt, Homo sapiens
  misc_RNA (1)...(19): siRNA sense strand
gugcgaacaagaagaagga

SEQ ID NO: 2669293 - RNA, 19 nt, Homo sapiens
  misc_RNA (1)...(19): siRNA sense strand
cuagaagacuauauucaca

SEQ ID NO: 2669294 - RNA, 19 nt, Homo sapiens
  misc_RNA (1)...(19): siRNA sense strand
gcaagaacaauguacuuca

SEQ ID NO: 2669295 - RNA, 19 nt, Homo sapiens
  misc_RNA (1)...(19): siRNA sense strand
aguaaagaugcagaggaaa

SEQ ID NO: 2669296 - RNA, 19 nt, Homo sapiens
  misc_RNA (1)...(19): siRNA sense strand
gcccacugauggaggcaca

SEQ ID NO: 2669297 - RNA, 19 nt, Homo sapiens
  misc_RNA (1)...(19): siRNA sense strand
agaagaagaagaagagcag

SEQ ID NO: 2669298 - RNA, 19 nt, Homo sapiens
  misc_RNA (1)...(19): siRNA sense strand
ucuccaggacagaagacua

SEQ ID NO: 2669299 - RNA, 19 nt, Homo sapiens
  misc_RNA (1)...(19): siRNA sense strand
ugagaaggauagagggcaa

SEQ ID NO: 2669300 - RNA, 19 nt, Homo sapiens
  misc_RNA (1)...(19): siRNA sense strand
ggaugaaguuauuugcaga

SEQ ID NO: 2669301 - RNA, 19 nt, Homo sapiens
  misc_RNA (1)...(19): siRNA sense strand
auggagaacugguggcaca

SEQ ID NO: 2669302 - RNA, 19 nt, Homo sapiens
  misc_RNA (1)...(19): siRNA sense strand
gcacaugcauuucaggaca

SEQ ID NO: 2669303 - RNA, 19 nt, Homo sapiens
  misc_RNA (1)...(19): siRNA sense strand
ggaucagauaacagcaauu

SEQ ID NO: 2669304 - RNA, 19 nt, Homo sapiens
  misc_RNA (1)...(19): siRNA sense strand
agacacacccggaguacuu

SEQ ID NO: 2669305 - RNA, 19 nt, Homo sapiens
  misc_RNA (1)...(19): siRNA sense strand
ucuacuucaucuuggacaa

SEQ ID NO: 2669306 - RNA, 19 nt, Homo sapiens
  misc_RNA (1)...(19): siRNA sense strand
ccucugaguguguaggaga

SEQ ID NO: 2669307 - RNA, 19 nt, Homo sapiens
  misc_RNA (1)...(19): siRNA sense strand
ugugguuauucauggaaau

SEQ ID NO: 2669308 - RNA, 19 nt, Homo sapiens
  misc_RNA (1)...(19): siRNA sense strand
auauguggguggaggaaac

SEQ ID NO: 2669309 - RNA, 19 nt, Homo sapiens
  misc_RNA (1)...(19): siRNA sense strand
acguguuugcaguggagaa

SEQ ID NO: 2669310 - RNA, 19 nt, Homo sapiens
  misc_RNA (1)...(19): siRNA sense strand
ccauggaccugacuggaga

SEQ ID NO: 2669311 - RNA, 19 nt, Homo sapiens
  misc_RNA (1)...(19): siRNA sense strand
gaaggagagaagagagcaa

SEQ ID NO: 2669312 - RNA, 19 nt, Homo sapiens
  misc_RNA (1)...(19): siRNA sense strand
cggagaaagucaggagaca

SEQ ID NO: 2669313 - RNA, 19 nt, Homo sapiens
  misc_RNA (1)...(19): siRNA sense strand
agccaaagccagagauuca

SEQ ID NO: 2669314 - RNA, 19 nt, Homo sapiens
  misc_RNA (1)...(19): siRNA sense strand
cugaaauggaugaaugauu

SEQ ID NO: 2669315 - RNA, 19 nt, Homo sapiens
  misc_RNA (1)...(19): siRNA sense strand
gcaagcaagauguggccaa

SEQ ID NO: 2669316 - RNA, 19 nt, Homo sapiens
  misc_RNA (1)...(19): siRNA sense strand
cuucaagugccaagaaaca

SEQ ID NO: 2669317 - RNA, 19 nt, Homo sapiens
  misc_RNA (1)...(19): siRNA sense strand
acaaaaggaagauaggaua

SEQ ID NO: 2669318 - RNA, 19 nt, Homo sapiens
  misc_RNA (1)...(19): siRNA sense strand
ccuuaagagaauuugaaga

SEQ ID NO: 2669319 - RNA, 19 nt, Homo sapiens
  misc_RNA (1)...(19): siRNA sense strand
aggacuuaaaugaggaaga

SEQ ID NO: 2669320 - RNA, 19 nt, Homo sapiens
  misc_RNA (1)...(19): siRNA sense strand
acaagaagagacugcggaa

SEQ ID NO: 2669321 - RNA, 19 nt, Homo sapiens
  misc_RNA (1)...(19): siRNA sense strand
gauaauuccuucagcagca

SEQ ID NO: 2669322 - RNA, 19 nt, Homo sapiens
  misc_RNA (1)...(19): siRNA sense strand
aagacaagaaccucauaaa

SEQ ID NO: 2669323 - RNA, 19 nt, Homo sapiens
  misc_RNA (1)...(19): siRNA sense strand
gcgacuucaaccaagaaua

SEQ ID NO: 2669324 - RNA, 19 nt, Homo sapiens
  misc_RNA (1)...(19): siRNA sense strand
caagaagagacugcggaaa

SEQ ID NO: 2669325 - RNA, 19 nt, Homo sapiens
  misc_RNA (1)...(19): siRNA sense strand
gccaagaaacagugcgacu

SEQ ID NO: 2669326 - RNA, 19 nt, Homo sapiens
  misc_RNA (1)...(19): siRNA sense strand
uguaacagagugugacgaa

SEQ ID NO: 2669327 - RNA, 19 nt, Homo sapiens
  misc_RNA (1)...(19): siRNA sense strand
accaauggcagaugaguau

SEQ ID NO: 2669328 - RNA, 19 nt, Homo sapiens
  misc_RNA (1)...(19): siRNA sense strand
gggcugacaagaagagacu

SEQ ID NO: 2669329 - RNA, 19 nt, Homo sapiens
  misc_RNA (1)...(19): siRNA sense strand
uaaacagcucaaagaacua

SEQ ID NO: 2669330 - RNA, 19 nt, Homo sapiens
  misc_RNA (1)...(19): siRNA sense strand
gaaaagaaauaccggccuu

SEQ ID NO: 2669331 - RNA, 19 nt, Homo sapiens
  misc_RNA (1)...(19): siRNA sense strand
cucaaagaacuaaagcuaa

SEQ ID NO: 2669332 - RNA, 19 nt, Homo sapiens
  misc_RNA (1)...(19): siRNA sense strand
uggacagcguauugcgaca

SEQ ID NO: 2669333 - RNA, 19 nt, Homo sapiens
  misc_RNA (1)...(19): siRNA sense strand
ggaagaagcugcucaggug

SEQ ID NO: 2669334 - RNA, 19 nt, Homo sapiens
  misc_RNA (1)...(19): siRNA sense strand
gcguauugcgacacagcau

SEQ ID NO: 2669335 - RNA, 19 nt, Homo sapiens
  misc_RNA (1)...(19): siRNA sense strand
cuaagguaacuaagcaaga

SEQ ID NO: 2669336 - RNA, 19 nt, Homo sapiens
  misc_RNA (1)...(19): siRNA sense strand
gagaauuugaagaacaguu

SEQ ID NO: 2669337 - RNA, 19 nt, Homo sapiens
  misc_RNA (1)...(19): siRNA sense strand
agccaaacugagacuauua

SEQ ID NO: 2669338 - RNA, 19 nt, Homo sapiens
  misc_RNA (1)...(19): siRNA sense strand
gcuuuaugaccgauacaga

SEQ ID NO: 2669339 - RNA, 19 nt, Homo sapiens
  misc_RNA (1)...(19): siRNA sense strand
cgacagugcaccagaagac

SEQ ID NO: 2669340 - RNA, 19 nt, Homo sapiens
  misc_RNA (1)...(19): siRNA sense strand
cguaaacagcucaaagaac

SEQ ID NO: 2669341 - RNA, 19 nt, Homo sapiens
  misc_RNA (1)...(19): siRNA sense strand
ccuaaaagcaagaaagaaa

SEQ ID NO: 2669342 - RNA, 19 nt, Homo sapiens
  misc_RNA (1)...(19): siRNA sense strand
ccuugugauugcagggaaa

SEQ ID NO: 2669343 - RNA, 19 nt, Homo sapiens
  misc_RNA (1)...(19): siRNA sense strand
aagaaauucaggagggcaa

SEQ ID NO: 2669344 - RNA, 19 nt, Homo sapiens
  misc_RNA (1)...(19): siRNA sense strand
cuggagaauuucaggaaga

SEQ ID NO: 2669345 - RNA, 19 nt, Homo sapiens
  misc_RNA (1)...(19): siRNA sense strand
ccagagaaggacaacgaaa

SEQ ID NO: 2669346 - RNA, 19 nt, Homo sapiens
  misc_RNA (1)...(19): siRNA sense strand
ugacauguucaaagacaaa

SEQ ID NO: 2669347 - RNA, 19 nt, Homo sapiens
  misc_RNA (1)...(19): siRNA sense strand
augugagacuggagaauuu

SEQ ID NO: 2669348 - RNA, 19 nt, Homo sapiens
  misc_RNA (1)...(19): siRNA sense strand
ccaaggaggucucugggaa

SEQ ID NO: 2669349 - RNA, 19 nt, Homo sapiens
  misc_RNA (1)...(19): siRNA sense strand
acgcaucaaacaugaaaua

SEQ ID NO: 2669350 - RNA, 19 nt, Homo sapiens
  misc_RNA (1)...(19): siRNA sense strand
caucuuuaagcaugagaaa

SEQ ID NO: 2669351 - RNA, 19 nt, Homo sapiens
  misc_RNA (1)...(19): siRNA sense strand
ccgaaaaggugauugugaa

SEQ ID NO: 2669352 - RNA, 19 nt, Homo sapiens
  misc_RNA (1)...(19): siRNA sense strand
ucauagaaaacgagaguau

SEQ ID NO: 2669353 - RNA, 19 nt, Homo sapiens
  misc_RNA (1)...(19): siRNA sense strand
cggaagagagaaagaccau

SEQ ID NO: 2669354 - RNA, 19 nt, Homo sapiens
  misc_RNA (1)...(19): siRNA sense strand
agggacauguacagggaau

SEQ ID NO: 2669355 - RNA, 19 nt, Homo sapiens
  misc_RNA (1)...(19): siRNA sense strand
acaacaauuccgauggcaa

SEQ ID NO: 2669356 - RNA, 19 nt, Homo sapiens
  misc_RNA (1)...(19): siRNA sense strand
uagaaggguaucaggaauu

SEQ ID NO: 2669357 - RNA, 19 nt, Homo sapiens
  misc_RNA (1)...(19): siRNA sense strand
cccaaagccugucggguau

SEQ ID NO: 2669358 - RNA, 19 nt, Homo sapiens
  misc_RNA (1)...(19): siRNA sense strand
ucaggaagauggaaggcau

SEQ ID NO: 2669359 - RNA, 19 nt, Homo sapiens
  misc_RNA (1)...(19): siRNA sense strand
ggagagugaaggcagcaaa

SEQ ID NO: 2669360 - RNA, 19 nt, Homo sapiens
  misc_RNA (1)...(19): siRNA sense strand
caggaaaaugagaacaaaa

SEQ ID NO: 2669361 - RNA, 19 nt, Homo sapiens
  misc_RNA (1)...(19): siRNA sense strand
cagcagcagacaugaagaa

SEQ ID NO: 2669362 - RNA, 19 nt, Homo sapiens
  misc_RNA (1)...(19): siRNA sense strand
gcacaaaccuaccggcaag

SEQ ID NO: 2669363 - RNA, 19 nt, Homo sapiens
  misc_RNA (1)...(19): siRNA sense strand
gccaaaucuuaaaggcaga

SEQ ID NO: 2669364 - RNA, 19 nt, Homo sapiens
  misc_RNA (1)...(19): siRNA sense strand
ggaggauaugaaacaauaa

SEQ ID NO: 2669365 - RNA, 19 nt, Homo sapiens
  misc_RNA (1)...(19): siRNA sense strand
auagaaggguaucaggaau

SEQ ID NO: 2669366 - RNA, 19 nt, Homo sapiens
  misc_RNA (1)...(19): siRNA sense strand
ucuuuaagcaugagaaacu

SEQ ID NO: 2669367 - RNA, 19 nt, Homo sapiens
  misc_RNA (1)...(19): siRNA sense strand
guuaaggauuccaacaaca

SEQ ID NO: 2669368 - RNA, 19 nt, Homo sapiens
  misc_RNA (1)...(19): siRNA sense strand
gugagaagguggcagagga

SEQ ID NO: 2669369 - RNA, 19 nt, Homo sapiens
  misc_RNA (1)...(19): siRNA sense strand
agaaggaagcucugcugaa

SEQ ID NO: 2669370 - RNA, 19 nt, Homo sapiens
  misc_RNA (1)...(19): siRNA sense strand
gaggaagaaacgaacguga

SEQ ID NO: 2669371 - RNA, 19 nt, Homo sapiens
  misc_RNA (1)...(19): siRNA sense strand
gcagcagacaugaagaaaa

SEQ ID NO: 2669372 - RNA, 19 nt, Homo sapiens
  misc_RNA (1)...(19): siRNA sense strand
ggugaagagugcagggcag

SEQ ID NO: 2669373 - RNA, 19 nt, Homo sapiens
  misc_RNA (1)...(19): siRNA sense strand
auucaggagggcaaggaua

SEQ ID NO: 2669374 - RNA, 19 nt, Homo sapiens
  misc_RNA (1)...(19): siRNA sense strand
cccacaaagaagagauuca

SEQ ID NO: 2669375 - RNA, 19 nt, Homo sapiens
  misc_RNA (1)...(19): siRNA sense strand
cgauagaacgaauacccua

SEQ ID NO: 2669376 - RNA, 19 nt, Homo sapiens
  misc_RNA (1)...(19): siRNA sense strand
ugugaugcaaagaggaauu

SEQ ID NO: 2669377 - RNA, 19 nt, Homo sapiens
  misc_RNA (1)...(19): siRNA sense strand
aggacgaggaagaaacgaa

SEQ ID NO: 2669378 - RNA, 19 nt, Homo sapiens
  misc_RNA (1)...(19): siRNA sense strand
cagaguagacccagagaag

SEQ ID NO: 2669379 - RNA, 19 nt, Homo sapiens
  misc_RNA (1)...(19): siRNA sense strand
cguccugaagcaagaaauu

SEQ ID NO: 2669380 - RNA, 19 nt, Homo sapiens
  misc_RNA (1)...(19): siRNA sense strand
gcgccaaaucuuaaaggca

SEQ ID NO: 2669381 - RNA, 19 nt, Homo sapiens
  misc_RNA (1)...(19): siRNA sense strand
agagaaggacaacgaaaca

SEQ ID NO: 2669382 - RNA, 19 nt, Homo sapiens
  misc_RNA (1)...(19): siRNA sense strand
uugaccaagccgaagaaua

SEQ ID NO: 2669383 - RNA, 19 nt, Homo sapiens
  misc_RNA (1)...(19): siRNA sense strand
acgugauaguucucagcua

SEQ ID NO: 2669384 - RNA, 19 nt, Homo sapiens
  misc_RNA (1)...(19): siRNA sense strand
aauagaaggguaucaggaa

SEQ ID NO: 2669385 - RNA, 19 nt, Homo sapiens
  misc_RNA (1)...(19): siRNA sense strand
gacuuuaauaagccagaaa

SEQ ID NO: 2669386 - RNA, 19 nt, Homo sapiens
  misc_RNA (1)...(19): siRNA sense strand
agucauugcuguuuccgaa

SEQ ID NO: 2669387 - RNA, 19 nt, Homo sapiens
  misc_RNA (1)...(19): siRNA sense strand
cuugugaugcaaagaggaa

SEQ ID NO: 2669388 - RNA, 19 nt, Homo sapiens
  misc_RNA (1)...(19): siRNA sense strand
gggcagaugaacaagccuu

SEQ ID NO: 2669389 - RNA, 19 nt, Homo sapiens
  misc_RNA (1)...(19): siRNA sense strand
gaaacugauugcuagggau

SEQ ID NO: 2669390 - RNA, 19 nt, Homo sapiens
  misc_RNA (1)...(19): siRNA sense strand
agcccucggaagagagaaa

SEQ ID NO: 2669391 - RNA, 19 nt, Homo sapiens
  misc_RNA (1)...(19): siRNA sense strand
ccuacguccugaagcaaga

SEQ ID NO: 2669392 - RNA, 19 nt, Homo sapiens
  misc_RNA (1)...(19): siRNA sense strand
augaacagacauccaaaua

SEQ ID NO: 2669393 - RNA, 19 nt, Homo sapiens
  misc_RNA (1)...(19): siRNA sense strand
aaacugaggccuugggaag

SEQ ID NO: 2669394 - RNA, 19 nt, Homo sapiens
  misc_RNA (1)...(19): siRNA sense strand
caugagaaacugagucgau

SEQ ID NO: 2669395 - RNA, 19 nt, Homo sapiens
  misc_RNA (1)...(19): siRNA sense strand
ccccaaagccugucgggua

SEQ ID NO: 2669396 - RNA, 19 nt, Homo sapiens
  misc_RNA (1)...(19): siRNA sense strand
agagaggaccagccggcaa

SEQ ID NO: 2669397 - RNA, 19 nt, Homo sapiens
  misc_RNA (1)...(19): siRNA sense strand
aggaauggacagaaggaag

SEQ ID NO: 2669398 - RNA, 19 nt, Homo sapiens
  misc_RNA (1)...(19): siRNA sense strand
gggaggacgaggaagaaac

SEQ ID NO: 2669399 - RNA, 19 nt, Homo sapiens
  misc_RNA (1)...(19): siRNA sense strand
aggaagaaacgaacgugau

SEQ ID NO: 2669400 - RNA, 19 nt, Homo sapiens
  misc_RNA (1)...(19): siRNA sense strand
auucagugguguuaaggau

SEQ ID NO: 2669401 - RNA, 19 nt, Homo sapiens
  misc_RNA (1)...(19): siRNA sense strand
aauccuaccauaugaaaga

SEQ ID NO: 2669402 - RNA, 19 nt, Homo sapiens
  misc_RNA (1)...(19): siRNA sense strand
ccaggaugcagcagagguu

SEQ ID NO: 2669403 - RNA, 19 nt, Homo sapiens
  misc_RNA (1)...(19): siRNA sense strand
auguacagggaaucggaaa

SEQ ID NO: 2669404 - RNA, 19 nt, Homo sapiens
  misc_RNA (1)...(19): siRNA sense strand
ggucuuaggcagccagagu

SEQ ID NO: 2669405 - RNA, 19 nt, Homo sapiens
  misc_RNA (1)...(19): siRNA sense strand
ggagaaggccucugagcag

SEQ ID NO: 2669406 - RNA, 19 nt, Homo sapiens
  misc_RNA (1)...(19): siRNA sense strand
cgacaaauucucagcagcu

SEQ ID NO: 2669407 - RNA, 19 nt, Homo sapiens
  misc_RNA (1)...(19): siRNA sense strand
aacaagaaguagaggacua

SEQ ID NO: 2669408 - RNA, 19 nt, Homo sapiens
  misc_RNA (1)...(19): siRNA sense strand
uauuguaaguggagaagaa

SEQ ID NO: 2669409 - RNA, 19 nt, Homo sapiens
  misc_RNA (1)...(19): siRNA sense strand
cacaaauaauugaggaaga

SEQ ID NO: 2669410 - RNA, 19 nt, Homo sapiens
  misc_RNA (1)...(19): siRNA sense strand
uguuacaguuggugugaaa

SEQ ID NO: 2669411 - RNA, 19 nt, Homo sapiens
  misc_RNA (1)...(19): siRNA sense strand
gcaacaacauguaugggaa

SEQ ID NO: 2669412 - RNA, 19 nt, Homo sapiens
  misc_RNA (1)...(19): siRNA sense strand
agucacaaucgaaggauaa

SEQ ID NO: 2669413 - RNA, 19 nt, Homo sapiens
  misc_RNA (1)...(19): siRNA sense strand
ccacaugaugcaaaggaua

SEQ ID NO: 2669414 - RNA, 19 nt, Homo sapiens
  misc_RNA (1)...(19): siRNA sense strand
caauguaacagaagccaaa

SEQ ID NO: 2669415 - RNA, 19 nt, Homo sapiens
  misc_RNA (1)...(19): siRNA sense strand
ccagcaauuuacagagcaa

SEQ ID NO: 2669416 - RNA, 19 nt, Homo sapiens
  misc_RNA (1)...(19): siRNA sense strand
gagucacaaucgaaggaua

SEQ ID NO: 2669417 - RNA, 19 nt, Homo sapiens
  misc_RNA (1)...(19): siRNA sense strand
gaucagacaaaguggccaa

SEQ ID NO: 2669418 - RNA, 19 nt, Homo sapiens
  misc_RNA (1)...(19): siRNA sense strand
uggccaaugcagugauaaa

SEQ ID NO: 2669419 - RNA, 19 nt, Homo sapiens
  misc_RNA (1)...(19): siRNA sense strand
gauuagaccaagaagaaaa

SEQ ID NO: 2669420 - RNA, 19 nt, Homo sapiens
  misc_RNA (1)...(19): siRNA sense strand
gauaguuugugaugggcaa

SEQ ID NO: 2669421 - RNA, 19 nt, Homo sapiens
  misc_RNA (1)...(19): siRNA sense strand
aguacagaaugaacaguaa

SEQ ID NO: 2669422 - RNA, 19 nt, Homo sapiens
  misc_RNA (1)...(19): siRNA sense strand
ugcuauaaccagagccaaa

SEQ ID NO: 2669423 - RNA, 19 nt, Homo sapiens
  misc_RNA (1)...(19): siRNA sense strand
aguuauuguaaguggagaa

SEQ ID NO: 2669424 - RNA, 19 nt, Homo sapiens
  misc_RNA (1)...(19): siRNA sense strand
ggaguguggaucagacaaa

SEQ ID NO: 2669425 - RNA, 19 nt, Homo sapiens
  misc_RNA (1)...(19): siRNA sense strand
cuaagaaaccagauggcau

SEQ ID NO: 2669426 - RNA, 19 nt, Homo sapiens
  misc_RNA (1)...(19): siRNA sense strand
acaucugacacuuggauaa

SEQ ID NO: 2669427 - RNA, 19 nt, Homo sapiens
  misc_RNA (1)...(19): siRNA sense strand
ucuacuaagccaagagaga

SEQ ID NO: 2669428 - RNA, 19 nt, Homo sapiens
  misc_RNA (1)...(19): siRNA sense strand
agacaagguuccagcgcca

SEQ ID NO: 2669429 - RNA, 19 nt, Homo sapiens
  misc_RNA (1)...(19): siRNA sense strand
uacagaacaaagagggaaa

SEQ ID NO: 2669430 - RNA, 19 nt, Homo sapiens
  misc_RNA (1)...(19): siRNA sense strand
gguuuggauugaaaggcaa

SEQ ID NO: 2669431 - RNA, 19 nt, Homo sapiens
  misc_RNA (1)...(19): siRNA sense strand
caacaacauguaugggaau

SEQ ID NO: 2669432 - RNA, 19 nt, Homo sapiens
  misc_RNA (1)...(19): siRNA sense strand
ggauauugaagaaagcauu

SEQ ID NO: 2669433 - RNA, 19 nt, Homo sapiens
  misc_RNA (1)...(19): siRNA sense strand
gccacaaauaauugaggaa

SEQ ID NO: 2669434 - RNA, 19 nt, Homo sapiens
  misc_RNA (1)...(19): siRNA sense strand
ucgugaaaccaauggauau

SEQ ID NO: 2669435 - RNA, 19 nt, Homo sapiens
  misc_RNA (1)...(19): siRNA sense strand
guacagaaugaacaguaaa

SEQ ID NO: 2669436 - RNA, 19 nt, Homo sapiens
  misc_RNA (1)...(19): siRNA sense strand
ggauggagcagcugaacga

SEQ ID NO: 2669437 - RNA, 19 nt, Homo sapiens
  misc_RNA (1)...(19): siRNA sense strand
acacacucaucguggguau

SEQ ID NO: 2669438 - RNA, 19 nt, Homo sapiens
  misc_RNA (1)...(19): siRNA sense strand
cagaaaagcuacaagaacu

SEQ ID NO: 2669439 - RNA, 19 nt, Homo sapiens
  misc_RNA (1)...(19): siRNA sense strand
aaggaaauguaccgcuuaa

SEQ ID NO: 2669440 - RNA, 19 nt, Homo sapiens
  misc_RNA (1)...(19): siRNA sense strand
acuuaaaacuggcaaagaa

SEQ ID NO: 2669441 - RNA, 19 nt, Homo sapiens
  misc_RNA (1)...(19): siRNA sense strand
gcccaaaauagaagaagaa

SEQ ID NO: 2669442 - RNA, 19 nt, Homo sapiens
  misc_RNA (1)...(19): siRNA sense strand
ugaaguuagccaaguuuaa

SEQ ID NO: 2669443 - RNA, 19 nt, Homo sapiens
  misc_RNA (1)...(19): siRNA sense strand
aagcaaacacacuuagaau

SEQ ID NO: 2669444 - RNA, 19 nt, Homo sapiens
  misc_RNA (1)...(19): siRNA sense strand
gcuaaugccugcuucggaa

SEQ ID NO: 2669445 - RNA, 19 nt, Homo sapiens
  misc_RNA (1)...(19): siRNA sense strand
ucuaauggcaggugacaga

SEQ ID NO: 2669446 - RNA, 19 nt, Homo sapiens
  misc_RNA (1)...(19): siRNA sense strand
ccguacaggcagcaauuaa

SEQ ID NO: 2669447 - RNA, 19 nt, Homo sapiens
  misc_RNA (1)...(19): siRNA sense strand
agucaauacuguacagaac

SEQ ID NO: 2669448 - RNA, 19 nt, Homo sapiens
  misc_RNA (1)...(19): siRNA sense strand
cggagcuauuucagaagaa

SEQ ID NO: 2669449 - RNA, 19 nt, Homo sapiens
  misc_RNA (1)...(19): siRNA sense strand
caauuuacagagcaagaaa

SEQ ID NO: 2669450 - RNA, 19 nt, Homo sapiens
  misc_RNA (1)...(19): siRNA sense strand
cauuaaauccuuagcucuu

SEQ ID NO: 2669451 - RNA, 19 nt, Homo sapiens
  misc_RNA (1)...(19): siRNA sense strand
aaagagggaaacugugaaa

SEQ ID NO: 2669452 - RNA, 19 nt, Homo sapiens
  misc_RNA (1)...(19): siRNA sense strand
gcaauguaacagaagccaa

SEQ ID NO: 2669453 - RNA, 19 nt, Homo sapiens
  misc_RNA (1)...(19): siRNA sense strand
agauaaugccgcuggaacu

SEQ ID NO: 2669454 - RNA, 19 nt, Homo sapiens
  misc_RNA (1)...(19): siRNA sense strand
ugccaaccaucuagauaaa

SEQ ID NO: 2669455 - RNA, 19 nt, Homo sapiens
  misc_RNA (1)...(19): siRNA sense strand
uuggaaaccugauuagaau

SEQ ID NO: 2669456 - RNA, 19 nt, Homo sapiens
  misc_RNA (1)...(19): siRNA sense strand
gugccauaccugucacaaa

SEQ ID NO: 2669457 - RNA, 19 nt, Homo sapiens
  misc_RNA (1)...(19): siRNA sense strand
aaccagagccaaacauaaa

SEQ ID NO: 2669458 - RNA, 19 nt, Homo sapiens
  misc_RNA (1)...(19): siRNA sense strand
agagcuguccugagugaaa

SEQ ID NO: 2669459 - RNA, 19 nt, Homo sapiens
  misc_RNA (1)...(19): siRNA sense strand
cugccaaccaucuagauaa

SEQ ID NO: 2669460 - RNA, 19 nt, Homo sapiens
  misc_RNA (1)...(19): siRNA sense strand
ggauaugugaaggagauua

SEQ ID NO: 2669461 - RNA, 19 nt, Homo sapiens
  misc_RNA (1)...(19): siRNA sense strand
cgccagaacaaguugaaaa

SEQ ID NO: 2669462 - RNA, 19 nt, Homo sapiens
  misc_RNA (1)...(19): siRNA sense strand
ccaguagagccaggagaua

SEQ ID NO: 2669463 - RNA, 19 nt, Homo sapiens
  misc_RNA (1)...(19): siRNA sense strand
gauuagaauggaacaugua

SEQ ID NO: 2669464 - RNA, 19 nt, Homo sapiens
  misc_RNA (1)...(19): siRNA sense strand
acgucuuaauguugcuaua

SEQ ID NO: 2669465 - RNA, 19 nt, Homo sapiens
  misc_RNA (1)...(19): siRNA sense strand
ucauucauuuggagggaga

SEQ ID NO: 2669466 - RNA, 19 nt, Homo sapiens
  misc_RNA (1)...(19): siRNA sense strand
caucgaggguauaaaacaa

SEQ ID NO: 2669467 - RNA, 19 nt, Homo sapiens
  misc_RNA (1)...(19): siRNA sense strand
ccugcauucuaaaggguuu

SEQ ID NO: 2669468 - RNA, 19 nt, Homo sapiens
  misc_RNA (1)...(19): siRNA sense strand
gcuucacagucacuagaaa

SEQ ID NO: 2669469 - RNA, 19 nt, Homo sapiens
  misc_RNA (1)...(19): siRNA sense strand
ccaucuagauaaaagagaa

SEQ ID NO: 2669470 - RNA, 19 nt, Homo sapiens
  misc_RNA (1)...(19): siRNA sense strand
agcaaacacacuuagaaua

SEQ ID NO: 2669471 - RNA, 19 nt, Homo sapiens
  misc_RNA (1)...(19): siRNA sense strand
gagagauggauguggccaa

SEQ ID NO: 2669472 - RNA, 19 nt, Homo sapiens
  misc_RNA (1)...(19): siRNA sense strand
aggcgaaggcagcgaaaga

SEQ ID NO: 2669473 - RNA, 19 nt, Homo sapiens
  misc_RNA (1)...(19): siRNA sense strand
gggaugucacugagaagau

SEQ ID NO: 2669474 - RNA, 19 nt, Homo sapiens
  misc_RNA (1)...(19): siRNA sense strand
ugcaguacuuggagcgcua

SEQ ID NO: 2669475 - RNA, 19 nt, Homo sapiens
  misc_RNA (1)...(19): siRNA sense strand
aggaggaguuccagaucca

SEQ ID NO: 2669476 - RNA, 19 nt, Homo sapiens
  misc_RNA (1)...(19): siRNA sense strand
gugugaagaaggaggugga

SEQ ID NO: 2669477 - RNA, 19 nt, Homo sapiens
  misc_RNA (1)...(19): siRNA sense strand
ccaagaggaggcugcggaa

SEQ ID NO: 2669478 - RNA, 19 nt, Homo sapiens
  misc_RNA (1)...(19): siRNA sense strand
aggccguguuggaguguga

SEQ ID NO: 2669479 - RNA, 19 nt, Homo sapiens
  misc_RNA (1)...(19): siRNA sense strand
uggaagagguggacagagc

SEQ ID NO: 2669480 - RNA, 19 nt, Homo sapiens
  misc_RNA (1)...(19): siRNA sense strand
uggaaaaccagaagaaguu

SEQ ID NO: 2669481 - RNA, 19 nt, Homo sapiens
  misc_RNA (1)...(19): siRNA sense strand
ggaugguggaagaggugga

SEQ ID NO: 2669482 - RNA, 19 nt, Homo sapiens
  misc_RNA (1)...(19): siRNA sense strand
cggaagguugucuggguga

SEQ ID NO: 2669483 - RNA, 19 nt, Homo sapiens
  misc_RNA (1)...(19): siRNA sense strand
gcuacuuccuggugcggga

SEQ ID NO: 2669484 - RNA, 19 nt, Homo sapiens
  misc_RNA (1)...(19): siRNA sense strand
gggaaggaggaugguggaa

SEQ ID NO: 2669485 - RNA, 19 nt, Homo sapiens
  misc_RNA (1)...(19): siRNA sense strand
ggaggaugguggaagaggu

SEQ ID NO: 2669486 - RNA, 19 nt, Homo sapiens
  misc_RNA (1)...(19): siRNA sense strand
ggcaagaagaacaagguau

SEQ ID NO: 2669487 - RNA, 19 nt, Homo sapiens
  misc_RNA (1)...(19): siRNA sense strand
uggcagucguggaggcuau

SEQ ID NO: 2669488 - RNA, 19 nt, Homo sapiens
  misc_RNA (1)...(19): siRNA sense strand
cuaccaacacccugagcaa

SEQ ID NO: 2669489 - RNA, 19 nt, Homo sapiens
  misc_RNA (1)...(19): siRNA sense strand
gguccaagugagaugagua

SEQ ID NO: 2669490 - RNA, 19 nt, Homo sapiens
  misc_RNA (1)...(19): siRNA sense strand
caacagugagcgaggcaga

SEQ ID NO: 2669491 - RNA, 19 nt, Homo sapiens
  misc_RNA (1)...(19): siRNA sense strand
agugcaaggaacaggacaa

SEQ ID NO: 2669492 - RNA, 19 nt, Homo sapiens
  misc_RNA (1)...(19): siRNA sense strand
gaucagggcagguggggaa

SEQ ID NO: 2669493 - RNA, 19 nt, Homo sapiens
  misc_RNA (1)...(19): siRNA sense strand
cgucagaccuggguggcua

SEQ ID NO: 2669494 - RNA, 19 nt, Homo sapiens
  misc_RNA (1)...(19): siRNA sense strand
ccaagggcaagaagaacaa

SEQ ID NO: 2669495 - RNA, 19 nt, Homo sapiens
  misc_RNA (1)...(19): siRNA sense strand
cagagaagaaugugccuga

SEQ ID NO: 2669496 - RNA, 19 nt, Homo sapiens
  misc_RNA (1)...(19): siRNA sense strand
gcaaacugcagguggcuca

SEQ ID NO: 2669497 - RNA, 19 nt, Homo sapiens
  misc_RNA (1)...(19): siRNA sense strand
cguuugugcugcaggagau

SEQ ID NO: 2669498 - RNA, 19 nt, Homo sapiens
  misc_RNA (1)...(19): siRNA sense strand
gccaagggcaagaagaaca

SEQ ID NO: 2669499 - RNA, 19 nt, Homo sapiens
  misc_RNA (1)...(19): siRNA sense strand
acaaggacgaccaggccaa

SEQ ID NO: 2669500 - RNA, 19 nt, Homo sapiens
  misc_RNA (1)...(19): siRNA sense strand
caggacagugacagcauua

SEQ ID NO: 2669501 - RNA, 19 nt, Homo sapiens
  misc_RNA (1)...(19): siRNA sense strand
caacuggaacagcgagaca

SEQ ID NO: 2669502 - RNA, 19 nt, Homo sapiens
  misc_RNA (1)...(19): siRNA sense strand
gaagaaugugccugagagu

SEQ ID NO: 2669503 - RNA, 19 nt, Homo sapiens
  misc_RNA (1)...(19): siRNA sense strand
caaagcugggagugaacua

SEQ ID NO: 2669504 - RNA, 19 nt, Homo sapiens
  misc_RNA (1)...(19): siRNA sense strand
gcaaacagaccaaggagcu

SEQ ID NO: 2669505 - RNA, 19 nt, Homo sapiens
  misc_RNA (1)...(19): siRNA sense strand
ccaagugagaugaguacca

SEQ ID NO: 2669506 - RNA, 19 nt, Homo sapiens
  misc_RNA (1)...(19): siRNA sense strand
agaaugugccugagaguuc

SEQ ID NO: 2669507 - RNA, 19 nt, Homo sapiens
  misc_RNA (1)...(19): siRNA sense strand
gcgcauggcuauagcagug

SEQ ID NO: 2669508 - RNA, 19 nt, Homo sapiens
  misc_RNA (1)...(19): siRNA sense strand
caucagaggcagcugcaca

SEQ ID NO: 2669509 - RNA, 19 nt, Homo sapiens
  misc_RNA (1)...(19): siRNA sense strand
acgaccaggccaagcuuaa

SEQ ID NO: 2669510 - RNA, 19 nt, Homo sapiens
  misc_RNA (1)...(19): siRNA sense strand
cuguagugccagugggauc

SEQ ID NO: 2669511 - RNA, 19 nt, Homo sapiens
  misc_RNA (1)...(19): siRNA sense strand
gggcagaggaacuucggga

SEQ ID NO: 2669512 - RNA, 19 nt, Homo sapiens
  misc_RNA (1)...(19): siRNA sense strand
ccuucgagauugggcuuua

SEQ ID NO: 2669513 - RNA, 19 nt, Homo sapiens
  misc_RNA (1)...(19): siRNA sense strand
ggguaugccugaggguaga

SEQ ID NO: 2669514 - RNA, 19 nt, Homo sapiens
  misc_RNA (1)...(19): siRNA sense strand
uggaggugaagcuggcaua

SEQ ID NO: 2669515 - RNA, 19 nt, Homo sapiens
  misc_RNA (1)...(19): siRNA sense strand
ggcaugaagacaacaguga

SEQ ID NO: 2669516 - RNA, 19 nt, Homo sapiens
  misc_RNA (1)...(19): siRNA sense strand
ccaagucgcaacuggaaca

SEQ ID NO: 2669517 - RNA, 19 nt, Homo sapiens
  misc_RNA (1)...(19): siRNA sense strand
ggagagucgcauggaggua

SEQ ID NO: 2669518 - RNA, 19 nt, Homo sapiens
  misc_RNA (1)...(19): siRNA sense strand
cagcagugccccugaaaca

SEQ ID NO: 2669519 - RNA, 19 nt, Homo sapiens
  misc_RNA (1)...(19): siRNA sense strand
ggaccgagagagccagaca

SEQ ID NO: 2669520 - RNA, 19 nt, Homo sapiens
  misc_RNA (1)...(19): siRNA sense strand
ggcaagaagaacaagguau

SEQ ID NO: 2669521 - RNA, 19 nt, Homo sapiens
  misc_RNA (1)...(19): siRNA sense strand
uggcagucguggaggcuau

SEQ ID NO: 2669522 - RNA, 19 nt, Homo sapiens
  misc_RNA (1)...(19): siRNA sense strand
cuaccaacacccugagcaa

SEQ ID NO: 2669523 - RNA, 19 nt, Homo sapiens
  misc_RNA (1)...(19): siRNA sense strand
gguccaagugagaugagua

SEQ ID NO: 2669524 - RNA, 19 nt, Homo sapiens
  misc_RNA (1)...(19): siRNA sense strand
caacagugagcgaggcaga

SEQ ID NO: 2669525 - RNA, 19 nt, Homo sapiens
  misc_RNA (1)...(19): siRNA sense strand
agugcaaggaacaggacaa

SEQ ID NO: 2669526 - RNA, 19 nt, Homo sapiens
  misc_RNA (1)...(19): siRNA sense strand
cgucagaccuggguggcua

SEQ ID NO: 2669527 - RNA, 19 nt, Homo sapiens
  misc_RNA (1)...(19): siRNA sense strand
ccaagggcaagaagaacaa

SEQ ID NO: 2669528 - RNA, 19 nt, Homo sapiens
  misc_RNA (1)...(19): siRNA sense strand
cagagaagaaugugccuga

SEQ ID NO: 2669529 - RNA, 19 nt, Homo sapiens
  misc_RNA (1)...(19): siRNA sense strand
gcaaacugcagguggcuca

SEQ ID NO: 2669530 - RNA, 19 nt, Homo sapiens
  misc_RNA (1)...(19): siRNA sense strand
cguuugugcugcaggagau

SEQ ID NO: 2669531 - RNA, 19 nt, Homo sapiens
  misc_RNA (1)...(19): siRNA sense strand
gccaagggcaagaagaaca

SEQ ID NO: 2669532 - RNA, 19 nt, Homo sapiens
  misc_RNA (1)...(19): siRNA sense strand
acaaggacgaccaggccaa

SEQ ID NO: 2669533 - RNA, 19 nt, Homo sapiens
  misc_RNA (1)...(19): siRNA sense strand
caggacagugacagcauua

SEQ ID NO: 2669534 - RNA, 19 nt, Homo sapiens
  misc_RNA (1)...(19): siRNA sense strand
gcgaggaagagaaggccga

SEQ ID NO: 2669535 - RNA, 19 nt, Homo sapiens
  misc_RNA (1)...(19): siRNA sense strand
caacuggaacagcgagaca

SEQ ID NO: 2669536 - RNA, 19 nt, Homo sapiens
  misc_RNA (1)...(19): siRNA sense strand
gaagaaugugccugagagu

SEQ ID NO: 2669537 - RNA, 19 nt, Homo sapiens
  misc_RNA (1)...(19): siRNA sense strand
caaagcugggagugaacua

SEQ ID NO: 2669538 - RNA, 19 nt, Homo sapiens
  misc_RNA (1)...(19): siRNA sense strand
ccaagugagaugaguacca

SEQ ID NO: 2669539 - RNA, 19 nt, Homo sapiens
  misc_RNA (1)...(19): siRNA sense strand
gcgcauggcuauagcagug

SEQ ID NO: 2669540 - RNA, 19 nt, Homo sapiens
  misc_RNA (1)...(19): siRNA sense strand
agaaugugccugagaguuc

SEQ ID NO: 2669541 - RNA, 19 nt, Homo sapiens
  misc_RNA (1)...(19): siRNA sense strand
caucagaggcagcugcaca

SEQ ID NO: 2669542 - RNA, 19 nt, Homo sapiens
  misc_RNA (1)...(19): siRNA sense strand
acgaccaggccaagcuuaa

SEQ ID NO: 2669543 - RNA, 19 nt, Homo sapiens
  misc_RNA (1)...(19): siRNA sense strand
cuguagugccagugggauc

SEQ ID NO: 2669544 - RNA, 19 nt, Homo sapiens
  misc_RNA (1)...(19): siRNA sense strand
gggcagaggaacuucggga

SEQ ID NO: 2669545 - RNA, 19 nt, Homo sapiens
  misc_RNA (1)...(19): siRNA sense strand
ccuucgagauugggcuuua

SEQ ID NO: 2669546 - RNA, 19 nt, Homo sapiens
  misc_RNA (1)...(19): siRNA sense strand
ggguaugccugaggguaga

SEQ ID NO: 2669547 - RNA, 19 nt, Homo sapiens
  misc_RNA (1)...(19): siRNA sense strand
uggaggugaagcuggcaua

SEQ ID NO: 2669548 - RNA, 19 nt, Homo sapiens
  misc_RNA (1)...(19): siRNA sense strand
ggcaugaagacaacaguga

SEQ ID NO: 2669549 - RNA, 19 nt, Homo sapiens
  misc_RNA (1)...(19): siRNA sense strand
ccaagucgcaacuggaaca

SEQ ID NO: 2669550 - RNA, 19 nt, Homo sapiens
  misc_RNA (1)...(19): siRNA sense strand
ggagagucgcauggaggua

SEQ ID NO: 2669551 - RNA, 19 nt, Homo sapiens
  misc_RNA (1)...(19): siRNA sense strand
cagcagugccccugaaaca

SEQ ID NO: 2669552 - RNA, 19 nt, Homo sapiens
  misc_RNA (1)...(19): siRNA sense strand
ggaccgagagagccagaca

SEQ ID NO: 2669553 - RNA, 19 nt, Homo sapiens
  misc_RNA (1)...(19): siRNA sense strand
agaagaagaaggagacaaa

SEQ ID NO: 2669554 - RNA, 19 nt, Homo sapiens
  misc_RNA (1)...(19): siRNA sense strand
gggaaagaggaauggagaa

SEQ ID NO: 2669555 - RNA, 19 nt, Homo sapiens
  misc_RNA (1)...(19): siRNA sense strand
ggaaagaggaauggagaau

SEQ ID NO: 2669556 - RNA, 19 nt, Homo sapiens
  misc_RNA (1)...(19): siRNA sense strand
cgagaaagcagaaaagaaa

SEQ ID NO: 2669557 - RNA, 19 nt, Homo sapiens
  misc_RNA (1)...(19): siRNA sense strand
cagagagaccagcgagaaa

SEQ ID NO: 2669558 - RNA, 19 nt, Homo sapiens
  misc_RNA (1)...(19): siRNA sense strand
gagaagaagaauuuggaau

SEQ ID NO: 2669559 - RNA, 19 nt, Homo sapiens
  misc_RNA (1)...(19): siRNA sense strand
cggaaaugcauauggaaca

SEQ ID NO: 2669560 - RNA, 19 nt, Homo sapiens
  misc_RNA (1)...(19): siRNA sense strand
gcuggaaaucaguggcaaa

SEQ ID NO: 2669561 - RNA, 19 nt, Homo sapiens
  misc_RNA (1)...(19): siRNA sense strand
aagaagaagaagaaggaga

SEQ ID NO: 2669562 - RNA, 19 nt, Homo sapiens
  misc_RNA (1)...(19): siRNA sense strand
ccucaaugcaagcggaaau

SEQ ID NO: 2669563 - RNA, 19 nt, Homo sapiens
  misc_RNA (1)...(19): siRNA sense strand
cggaacaggacuuggaaaa

SEQ ID NO: 2669564 - RNA, 19 nt, Homo sapiens
  misc_RNA (1)...(19): siRNA sense strand
gcauagaaguggaggccgu

SEQ ID NO: 2669565 - RNA, 19 nt, Homo sapiens
  misc_RNA (1)...(19): siRNA sense strand
aaaagaaaugggaggaaaa

SEQ ID NO: 2669566 - RNA, 19 nt, Homo sapiens
  misc_RNA (1)...(19): siRNA sense strand
cuauaaugggaaagaguuu

SEQ ID NO: 2669567 - RNA, 19 nt, Homo sapiens
  misc_RNA (1)...(19): siRNA sense strand
caaaggaugaggaggaaga

SEQ ID NO: 2669568 - RNA, 19 nt, Homo sapiens
  misc_RNA (1)...(19): siRNA sense strand
ccuaagugggaaagaggaa

SEQ ID NO: 2669569 - RNA, 19 nt, Homo sapiens
  misc_RNA (1)...(19): siRNA sense strand
ggaucacuauaaugggaaa

SEQ ID NO: 2669570 - RNA, 19 nt, Homo sapiens
  misc_RNA (1)...(19): siRNA sense strand
uagaagaagcucaggccaa

SEQ ID NO: 2669571 - RNA, 19 nt, Homo sapiens
  misc_RNA (1)...(19): siRNA sense strand
ggucaggcgauguggucua

SEQ ID NO: 2669572 - RNA, 19 nt, Homo sapiens
  misc_RNA (1)...(19): siRNA sense strand
uggaagacuuuguugaaga

SEQ ID NO: 2669573 - RNA, 19 nt, Homo sapiens
  misc_RNA (1)...(19): siRNA sense strand
cagacagaaaucaaggaaa

SEQ ID NO: 2669574 - RNA, 19 nt, Homo sapiens
  misc_RNA (1)...(19): siRNA sense strand
gaagagaugucaagccuga

SEQ ID NO: 2669575 - RNA, 19 nt, Homo sapiens
  misc_RNA (1)...(19): siRNA sense strand
gcaucaagaacaucagaau

SEQ ID NO: 2669576 - RNA, 19 nt, Homo sapiens
  misc_RNA (1)...(19): siRNA sense strand
ugagaagcuccuagaagaa

SEQ ID NO: 2669577 - RNA, 19 nt, Homo sapiens
  misc_RNA (1)...(19): siRNA sense strand
aggaugaggaggaagaaga

SEQ ID NO: 2669578 - RNA, 19 nt, Homo sapiens
  misc_RNA (1)...(19): siRNA sense strand
ccacacagauagugcagga

SEQ ID NO: 2669579 - RNA, 19 nt, Homo sapiens
  misc_RNA (1)...(19): siRNA sense strand
gucaagaaguugugcgagu

SEQ ID NO: 2669580 - RNA, 19 nt, Homo sapiens
  misc_RNA (1)...(19): siRNA sense strand
ugacagacguccugaccau

SEQ ID NO: 2669581 - RNA, 19 nt, Homo sapiens
  misc_RNA (1)...(19): siRNA sense strand
gguggaacuuucagaagau

SEQ ID NO: 2669582 - RNA, 19 nt, Homo sapiens
  misc_RNA (1)...(19): siRNA sense strand
aggaggaagaagaagaaga

SEQ ID NO: 2669583 - RNA, 19 nt, Homo sapiens
  misc_RNA (1)...(19): siRNA sense strand
gaggaauggagaauaguau

SEQ ID NO: 2669584 - RNA, 19 nt, Homo sapiens
  misc_RNA (1)...(19): siRNA sense strand
uaguggagcaagagagaca

SEQ ID NO: 2669585 - RNA, 19 nt, Homo sapiens
  misc_RNA (1)...(19): siRNA sense strand
gccaauaucaugaagucaa

SEQ ID NO: 2669586 - RNA, 19 nt, Homo sapiens
  misc_RNA (1)...(19): siRNA sense strand
agaagaucgucaagaaguu

SEQ ID NO: 2669587 - RNA, 19 nt, Homo sapiens
  misc_RNA (1)...(19): siRNA sense strand
cagugaagaugcuggacca

SEQ ID NO: 2669588 - RNA, 19 nt, Homo sapiens
  misc_RNA (1)...(19): siRNA sense strand
uguacagaaaugaggguuu

SEQ ID NO: 2669589 - RNA, 19 nt, Homo sapiens
  misc_RNA (1)...(19): siRNA sense strand
ccgauugguuacucugaaa

SEQ ID NO: 2669590 - RNA, 19 nt, Homo sapiens
  misc_RNA (1)...(19): siRNA sense strand
agucggaaguggugccuuu

SEQ ID NO: 2669591 - RNA, 19 nt, Homo sapiens
  misc_RNA (1)...(19): siRNA sense strand
gggcagugucuaucgagaa

SEQ ID NO: 2669592 - RNA, 19 nt, Homo sapiens
  misc_RNA (1)...(19): siRNA sense strand
caguacauggcuauggaaa

SEQ ID NO: 2669593 - RNA, 19 nt, Homo sapiens
  misc_RNA (1)...(19): siRNA sense strand
cacccaaggagaagaagaa

SEQ ID NO: 2669594 - RNA, 19 nt, Homo sapiens
  misc_RNA (1)...(19): siRNA sense strand
uggaaacaaugaagagacu

SEQ ID NO: 2669595 - RNA, 19 nt, Homo sapiens
  misc_RNA (1)...(19): siRNA sense strand
ccggauagccauuugccua

SEQ ID NO: 2669596 - RNA, 19 nt, Homo sapiens
  misc_RNA (1)...(19): siRNA sense strand
ccaauaucaugaagucaau

SEQ ID NO: 2669597 - RNA, 19 nt, Homo sapiens
  misc_RNA (1)...(19): siRNA sense strand
aggaagagaagaucgucaa

SEQ ID NO: 2669598 - RNA, 19 nt, Homo sapiens
  misc_RNA (1)...(19): siRNA sense strand
gcgacaauacccaaagaca

SEQ ID NO: 2669599 - RNA, 19 nt, Homo sapiens
  misc_RNA (1)...(19): siRNA sense strand
ccgcagaaguccugaagag

SEQ ID NO: 2669600 - RNA, 19 nt, Homo sapiens
  misc_RNA (1)...(19): siRNA sense strand
ggcaaaaucuggaucacua

SEQ ID NO: 2669601 - RNA, 19 nt, Homo sapiens
  misc_RNA (1)...(19): siRNA sense strand
ugaagaaggccgagcugga

SEQ ID NO: 2669602 - RNA, 19 nt, Homo sapiens
  misc_RNA (1)...(19): siRNA sense strand
uugaagacuugaagaagga

SEQ ID NO: 2669603 - RNA, 19 nt, Homo sapiens
  misc_RNA (1)...(19): siRNA sense strand
gagacaaaauaauggcaga

SEQ ID NO: 2669604 - RNA, 19 nt, Homo sapiens
  misc_RNA (1)...(19): siRNA sense strand
cccaaggagaagaagaauu

SEQ ID NO: 2669605 - RNA, 19 nt, Homo sapiens
  misc_RNA (1)...(19): siRNA sense strand
aguacauggcuauggaaaa

SEQ ID NO: 2669606 - RNA, 19 nt, Homo sapiens
  misc_RNA (1)...(19): siRNA sense strand
gaugaagacaugaguggca

SEQ ID NO: 2669607 - RNA, 19 nt, Homo sapiens
  misc_RNA (1)...(19): siRNA sense strand
ccuaguggagcaagagaga

SEQ ID NO: 2669608 - RNA, 19 nt, Homo sapiens
  misc_RNA (1)...(19): siRNA sense strand
guggagcaagagagacaaa

SEQ ID NO: 2669609 - RNA, 19 nt, Homo sapiens
  misc_RNA (1)...(19): siRNA sense strand
gacagaaaucaaggaaaua

SEQ ID NO: 2669610 - RNA, 19 nt, Homo sapiens
  misc_RNA (1)...(19): siRNA sense strand
uuguugaagacuugaagaa

SEQ ID NO: 2669611 - RNA, 19 nt, Homo sapiens
  misc_RNA (1)...(19): siRNA sense strand
gggcuuuccuccugcguca

SEQ ID NO: 2669612 - RNA, 19 nt, Homo sapiens
  misc_RNA (1)...(19): siRNA sense strand
ccgcacaguacauggcuau

SEQ ID NO: 2669613 - RNA, 19 nt, Homo sapiens
  misc_RNA (1)...(19): siRNA sense strand
agaagaaggagacaaaaua

SEQ ID NO: 2669614 - RNA, 19 nt, Homo sapiens
  misc_RNA (1)...(19): siRNA sense strand
gcgagaaaaugaugaaaac

SEQ ID NO: 2669615 - RNA, 19 nt, Homo sapiens
  misc_RNA (1)...(19): siRNA sense strand
gagaaaaugaugaaaacca

SEQ ID NO: 2669616 - RNA, 19 nt, Homo sapiens
  misc_RNA (1)...(19): siRNA sense strand
gaggaagagaagaucguca

SEQ ID NO: 2669617 - RNA, 19 nt, Homo sapiens
  misc_RNA (1)...(19): siRNA sense strand
cucugaaagacguggaaga

SEQ ID NO: 2669618 - RNA, 19 nt, Homo sapiens
  misc_RNA (1)...(19): siRNA sense strand
augaggaggaagaagaaga

SEQ ID NO: 2669619 - RNA, 19 nt, Homo sapiens
  misc_RNA (1)...(19): siRNA sense strand
ugaagacaugaguggcaaa

SEQ ID NO: 2669620 - RNA, 19 nt, Homo sapiens
  misc_RNA (1)...(19): siRNA sense strand
guggcaaagugauggaaac

SEQ ID NO: 2669621 - RNA, 19 nt, Homo sapiens
  misc_RNA (1)...(19): siRNA sense strand
agaagaagcucaggccaau

SEQ ID NO: 2669622 - RNA, 19 nt, Homo sapiens
  misc_RNA (1)...(19): siRNA sense strand
aagaagaagaaggagacaa

SEQ ID NO: 2669623 - RNA, 19 nt, Homo sapiens
  misc_RNA (1)...(19): siRNA sense strand
aagaagaaggagacaaaau

SEQ ID NO: 2669624 - RNA, 19 nt, Homo sapiens
  misc_RNA (1)...(19): siRNA sense strand
ucgagaaagcagaaaagaa

SEQ ID NO: 2669625 - RNA, 19 nt, Homo sapiens
  misc_RNA (1)...(19): siRNA sense strand
agguggaacuuucagaaga

SEQ ID NO: 2669626 - RNA, 19 nt, Homo sapiens
  misc_RNA (1)...(19): siRNA sense strand
agaaagaagaugaucacaa

SEQ ID NO: 2669627 - RNA, 19 nt, Homo sapiens
  misc_RNA (1)...(19): siRNA sense strand
cugauaacacagagacuaa

SEQ ID NO: 2669628 - RNA, 19 nt, Homo sapiens
  misc_RNA (1)...(19): siRNA sense strand
gcaaagagcauccgggcau

SEQ ID NO: 2669629 - RNA, 19 nt, Homo sapiens
  misc_RNA (1)...(19): siRNA sense strand
gccaaaagauaaagagaca

SEQ ID NO: 2669630 - RNA, 19 nt, Homo sapiens
  misc_RNA (1)...(19): siRNA sense strand
gagucuuaccagugaacaa

SEQ ID NO: 2669631 - RNA, 19 nt, Homo sapiens
  misc_RNA (1)...(19): siRNA sense strand
gaaguaugccuuugggaga

SEQ ID NO: 2669632 - RNA, 19 nt, Homo sapiens
  misc_RNA (1)...(19): siRNA sense strand
cagaaagccaagaggagga

SEQ ID NO: 2669633 - RNA, 19 nt, Homo sapiens
  misc_RNA (1)...(19): siRNA sense strand
uagcaagcgccaaggagaa

SEQ ID NO: 2669634 - RNA, 19 nt, Homo sapiens
  misc_RNA (1)...(19): siRNA sense strand
aauuaaaggccuaggauuc

SEQ ID NO: 2669635 - RNA, 19 nt, Homo sapiens
  misc_RNA (1)...(19): siRNA sense strand
gugccagaauuuggagaaa

SEQ ID NO: 2669636 - RNA, 19 nt, Homo sapiens
  misc_RNA (1)...(19): siRNA sense strand
aaauaggacaccaggaaaa

SEQ ID NO: 2669637 - RNA, 19 nt, Homo sapiens
  misc_RNA (1)...(19): siRNA sense strand
cauaugaggaugagcuaga

SEQ ID NO: 2669638 - RNA, 19 nt, Homo sapiens
  misc_RNA (1)...(19): siRNA sense strand
caauuaaaggccuaggauu

SEQ ID NO: 2669639 - RNA, 19 nt, Homo sapiens
  misc_RNA (1)...(19): siRNA sense strand
cagaagcauaugaggauga

SEQ ID NO: 2669640 - RNA, 19 nt, Homo sapiens
  misc_RNA (1)...(19): siRNA sense strand
guacaaaagaugugucaga

SEQ ID NO: 2669641 - RNA, 19 nt, Homo sapiens
  misc_RNA (1)...(19): siRNA sense strand
gcuuggauccagaggacau

SEQ ID NO: 2669642 - RNA, 19 nt, Homo sapiens
  misc_RNA (1)...(19): siRNA sense strand
ucaacaauucagaguguau

SEQ ID NO: 2669643 - RNA, 19 nt, Homo sapiens
  misc_RNA (1)...(19): siRNA sense strand
agauaaagagacaaacaga

SEQ ID NO: 2669644 - RNA, 19 nt, Homo sapiens
  misc_RNA (1)...(19): siRNA sense strand
ccccaaagcuguagcauca

SEQ ID NO: 2669645 - RNA, 19 nt, Homo sapiens
  misc_RNA (1)...(19): siRNA sense strand
gcauauuucaggaaguaca

SEQ ID NO: 2669646 - RNA, 19 nt, Homo sapiens
  misc_RNA (1)...(19): siRNA sense strand
cuacagaagcauaugagga

SEQ ID NO: 2669647 - RNA, 19 nt, Homo sapiens
  misc_RNA (1)...(19): siRNA sense strand
gcaccaucuuggcgcagaa

SEQ ID NO: 2669648 - RNA, 19 nt, Homo sapiens
  misc_RNA (1)...(19): siRNA sense strand
augcccaacuggaaauaua

SEQ ID NO: 2669649 - RNA, 19 nt, Homo sapiens
  misc_RNA (1)...(19): siRNA sense strand
ggaagaguccaguagccua

SEQ ID NO: 2669650 - RNA, 19 nt, Homo sapiens
  misc_RNA (1)...(19): siRNA sense strand
cugcggaggagccaagaaa

SEQ ID NO: 2669651 - RNA, 19 nt, Homo sapiens
  misc_RNA (1)...(19): siRNA sense strand
gccaagaggaggagacaac

SEQ ID NO: 2669652 - RNA, 19 nt, Homo sapiens
  misc_RNA (1)...(19): siRNA sense strand
gcggacgggucaugaggau

SEQ ID NO: 2669653 - RNA, 19 nt, Homo sapiens
  misc_RNA (1)...(19): siRNA sense strand
aaacagcagguguggaaga

SEQ ID NO: 2669654 - RNA, 19 nt, Homo sapiens
  misc_RNA (1)...(19): siRNA sense strand
ucuuggauuagcugggaaa

SEQ ID NO: 2669655 - RNA, 19 nt, Homo sapiens
  misc_RNA (1)...(19): siRNA sense strand
aagaagaugaucacaaaca

SEQ ID NO: 2669656 - RNA, 19 nt, Homo sapiens
  misc_RNA (1)...(19): siRNA sense strand
ccacagaaagccaagagga

SEQ ID NO: 2669657 - RNA, 19 nt, Homo sapiens
  misc_RNA (1)...(19): siRNA sense strand
ggaggagacaacagaaaau

SEQ ID NO: 2669658 - RNA, 19 nt, Homo sapiens
  misc_RNA (1)...(19): siRNA sense strand
cauagauaaggcugaagua

SEQ ID NO: 2669659 - RNA, 19 nt, Homo sapiens
  misc_RNA (1)...(19): siRNA sense strand
accaaaugcuggaagaagu

SEQ ID NO: 2669660 - RNA, 19 nt, Homo sapiens
  misc_RNA (1)...(19): siRNA sense strand
caauaacccacgagaugau

SEQ ID NO: 2669661 - RNA, 19 nt, Homo sapiens
  misc_RNA (1)...(19): siRNA sense strand
uuagcaugcugguggucua

SEQ ID NO: 2669662 - RNA, 19 nt, Homo sapiens
  misc_RNA (1)...(19): siRNA sense strand
cugaacagcaguaucaauu

SEQ ID NO: 2669663 - RNA, 19 nt, Homo sapiens
  misc_RNA (1)...(19): siRNA sense strand
gaagaagggccuaggucgu

SEQ ID NO: 2669664 - RNA, 19 nt, Homo sapiens
  misc_RNA (1)...(19): siRNA sense strand
gcgccaaggagaagacucu

SEQ ID NO: 2669665 - RNA, 19 nt, Homo sapiens
  misc_RNA (1)...(19): siRNA sense strand
augaaacaacaaaggguca

SEQ ID NO: 2669666 - RNA, 19 nt, Homo sapiens
  misc_RNA (1)...(19): siRNA sense strand
gggaaauccaaggaggaga

SEQ ID NO: 2669667 - RNA, 19 nt, Homo sapiens
  misc_RNA (1)...(19): siRNA sense strand
uugcaaagcaggauucuau

SEQ ID NO: 2669668 - RNA, 19 nt, Homo sapiens
  misc_RNA (1)...(19): siRNA sense strand
cagggaaauccaaggagga

SEQ ID NO: 2669669 - RNA, 19 nt, Homo sapiens
  misc_RNA (1)...(19): siRNA sense strand
acgagaugauauugcuaca

SEQ ID NO: 2669670 - RNA, 19 nt, Homo sapiens
  misc_RNA (1)...(19): siRNA sense strand
ugagagaccaaacggaaga

SEQ ID NO: 2669671 - RNA, 19 nt, Homo sapiens
  misc_RNA (1)...(19): siRNA sense strand
cagaauuuggagaaacaga

SEQ ID NO: 2669672 - RNA, 19 nt, Homo sapiens
  misc_RNA (1)...(19): siRNA sense strand
aagaaaucccacagcacuu

SEQ ID NO: 2669673 - RNA, 19 nt, Homo sapiens
  misc_RNA (1)...(19): siRNA sense strand
caaccaaaugcuggaagaa

SEQ ID NO: 2669674 - RNA, 19 nt, Homo sapiens
  misc_RNA (1)...(19): siRNA sense strand
cgccuuaucuggagugcga

SEQ ID NO: 2669675 - RNA, 19 nt, Homo sapiens
  misc_RNA (1)...(19): siRNA sense strand
cggagaucccagagacagu

SEQ ID NO: 2669676 - RNA, 19 nt, Homo sapiens
  misc_RNA (1)...(19): siRNA sense strand
cuggaaucccugucgggua

SEQ ID NO: 2669677 - RNA, 19 nt, Homo sapiens
  misc_RNA (1)...(19): siRNA sense strand
cagaagucucucaguguca

SEQ ID NO: 2669678 - RNA, 19 nt, Homo sapiens
  misc_RNA (1)...(19): siRNA sense strand
gggacaagagccacuucaa

SEQ ID NO: 2669679 - RNA, 19 nt, Homo sapiens
  misc_RNA (1)...(19): siRNA sense strand
gaucagcauauuucaggaa

SEQ ID NO: 2669680 - RNA, 19 nt, Homo sapiens
  misc_RNA (1)...(19): siRNA sense strand
cguccaggaagauaaguau

SEQ ID NO: 2669681 - RNA, 19 nt, Homo sapiens
  misc_RNA (1)...(19): siRNA sense strand
agaugauauugcuacagaa

SEQ ID NO: 2669682 - RNA, 19 nt, Homo sapiens
  misc_RNA (1)...(19): siRNA sense strand
gcacuaaaucccagaaacc

SEQ ID NO: 2669683 - RNA, 19 nt, Homo sapiens
  misc_RNA (1)...(19): siRNA sense strand
gguuuguccuugggaguuu

SEQ ID NO: 2669684 - RNA, 19 nt, Homo sapiens
  misc_RNA (1)...(19): siRNA sense strand
ucuacggguugcagccuaa

SEQ ID NO: 2669685 - RNA, 19 nt, Homo sapiens
  misc_RNA (1)...(19): siRNA sense strand
auaaaugccaccucaacaa

SEQ ID NO: 2669686 - RNA, 19 nt, Homo sapiens
  misc_RNA (1)...(19): siRNA sense strand
cgggaagaggugagaguaa

SEQ ID NO: 2669687 - RNA, 19 nt, Homo sapiens
  misc_RNA (1)...(19): siRNA sense strand
gggaagaagaauugcgaau

SEQ ID NO: 2669688 - RNA, 19 nt, Homo sapiens
  misc_RNA (1)...(19): siRNA sense strand
gaucacaaacagaggccaa

SEQ ID NO: 2669689 - RNA, 19 nt, Homo sapiens
  misc_RNA (1)...(19): siRNA sense strand
ccagaagaagacagacaaa

SEQ ID NO: 2669690 - RNA, 19 nt, Homo sapiens
  misc_RNA (1)...(19): siRNA sense strand
ggaagaagguggcggugca

SEQ ID NO: 2669691 - RNA, 19 nt, Homo sapiens
  misc_RNA (1)...(19): siRNA sense strand
aaaacaagaucuaggggaa

SEQ ID NO: 2669692 - RNA, 19 nt, Homo sapiens
  misc_RNA (1)...(19): siRNA sense strand
ggaaaugaggguugagcca

SEQ ID NO: 2669693 - RNA, 19 nt, Homo sapiens
  misc_RNA (1)...(19): siRNA sense strand
aggaggacgccgaggaauu

SEQ ID NO: 2669694 - RNA, 19 nt, Homo sapiens
  misc_RNA (1)...(19): siRNA sense strand
cugcaaggauccugggcau

SEQ ID NO: 2669695 - RNA, 19 nt, Homo sapiens
  misc_RNA (1)...(19): siRNA sense strand
cagauagagauauggacaa

SEQ ID NO: 2669696 - RNA, 19 nt, Homo sapiens
  misc_RNA (1)...(19): siRNA sense strand
ggaaguuggaggaagguca

SEQ ID NO: 2669697 - RNA, 19 nt, Homo sapiens
  misc_RNA (1)...(19): siRNA sense strand
ccagauagagauauggaca

SEQ ID NO: 2669698 - RNA, 19 nt, Homo sapiens
  misc_RNA (1)...(19): siRNA sense strand
cuuugaugauccacgguua

SEQ ID NO: 2669699 - RNA, 19 nt, Homo sapiens
  misc_RNA (1)...(19): siRNA sense strand
agacauaaagcuugacgau

SEQ ID NO: 2669700 - RNA, 19 nt, Homo sapiens
  misc_RNA (1)...(19): siRNA sense strand
gcauugagguggcggugga

SEQ ID NO: 2669701 - RNA, 19 nt, Homo sapiens
  misc_RNA (1)...(19): siRNA sense strand
ggagaagagcauggaucaa

SEQ ID NO: 2669702 - RNA, 19 nt, Homo sapiens
  misc_RNA (1)...(19): siRNA sense strand
agccugaguugcacggaaa

SEQ ID NO: 2669703 - RNA, 19 nt, Homo sapiens
  misc_RNA (1)...(19): siRNA sense strand
gcggaaacagcccggaaau

SEQ ID NO: 2669704 - RNA, 19 nt, Homo sapiens
  misc_RNA (1)...(19): siRNA sense strand
gagggaggguccaugggaa

SEQ ID NO: 2669705 - RNA, 19 nt, Homo sapiens
  misc_RNA (1)...(19): siRNA sense strand
gaagaagccaguuugggaa

SEQ ID NO: 2669706 - RNA, 19 nt, Homo sapiens
  misc_RNA (1)...(19): siRNA sense strand
guaaacaacucuuugggca

SEQ ID NO: 2669707 - RNA, 19 nt, Homo sapiens
  misc_RNA (1)...(19): siRNA sense strand
aaaugaggguugagccaca

SEQ ID NO: 2669708 - RNA, 19 nt, Homo sapiens
  misc_RNA (1)...(19): siRNA sense strand
aagaagacagacaaacaaa

SEQ ID NO: 2669709 - RNA, 19 nt, Homo sapiens
  misc_RNA (1)...(19): siRNA sense strand
aggagaagagcauggauca

SEQ ID NO: 2669710 - RNA, 19 nt, Homo sapiens
  misc_RNA (1)...(19): siRNA sense strand
caguuugggaagaagaauu

SEQ ID NO: 2669711 - RNA, 19 nt, Homo sapiens
  misc_RNA (1)...(19): siRNA sense strand
gcagcagugaggagaguga

SEQ ID NO: 2669712 - RNA, 19 nt, Homo sapiens
  misc_RNA (1)...(19): siRNA sense strand
gaacaaaaggauguggaaa

SEQ ID NO: 2669713 - RNA, 19 nt, Homo sapiens
  misc_RNA (1)...(19): siRNA sense strand
gaaugaaagaggugagcuc

SEQ ID NO: 2669714 - RNA, 19 nt, Homo sapiens
  misc_RNA (1)...(19): siRNA sense strand
cgggcacacuggaagacaa

SEQ ID NO: 2669715 - RNA, 19 nt, Homo sapiens
  misc_RNA (1)...(19): siRNA sense strand
ggugagaguaagucugaga

SEQ ID NO: 2669716 - RNA, 19 nt, Homo sapiens
  misc_RNA (1)...(19): siRNA sense strand
gcacaaaaggagaagagca

SEQ ID NO: 2669717 - RNA, 19 nt, Homo sapiens
  misc_RNA (1)...(19): siRNA sense strand
aggaaauuagggaggcaga

SEQ ID NO: 2669718 - RNA, 19 nt, Homo sapiens
  misc_RNA (1)...(19): siRNA sense strand
acagggugccagugagcua

SEQ ID NO: 2669719 - RNA, 19 nt, Homo sapiens
  misc_RNA (1)...(19): siRNA sense strand
cuuacaaagcacagagaac

SEQ ID NO: 2669720 - RNA, 19 nt, Homo sapiens
  misc_RNA (1)...(19): siRNA sense strand
gaggaaggucagagcaugu

SEQ ID NO: 2669721 - RNA, 19 nt, Homo sapiens
  misc_RNA (1)...(19): siRNA sense strand
gacaggaggaugugggcuu

SEQ ID NO: 2669722 - RNA, 19 nt, Homo sapiens
  misc_RNA (1)...(19): siRNA sense strand
ggaagaggugagaguaagu

SEQ ID NO: 2669723 - RNA, 19 nt, Homo sapiens
  misc_RNA (1)...(19): siRNA sense strand
cacaaaaggagaagagcau

SEQ ID NO: 2669724 - RNA, 19 nt, Homo sapiens
  misc_RNA (1)...(19): siRNA sense strand
ugacagugguggagagagg

SEQ ID NO: 2669725 - RNA, 19 nt, Homo sapiens
  misc_RNA (1)...(19): siRNA sense strand
uggaggaaggucagagcau

SEQ ID NO: 2669726 - RNA, 19 nt, Homo sapiens
  misc_RNA (1)...(19): siRNA sense strand
cugugaagacauaaagcuu

SEQ ID NO: 2669727 - RNA, 19 nt, Homo sapiens
  misc_RNA (1)...(19): siRNA sense strand
aggaagcaugggugggaga

SEQ ID NO: 2669728 - RNA, 19 nt, Homo sapiens
  misc_RNA (1)...(19): siRNA sense strand
gugaugaagaagccaguuu

SEQ ID NO: 2669729 - RNA, 19 nt, Homo sapiens
  misc_RNA (1)...(19): siRNA sense strand
ccgccugaugagaaugaaa

SEQ ID NO: 2669730 - RNA, 19 nt, Homo sapiens
  misc_RNA (1)...(19): siRNA sense strand
aaccagaagaagacagaca

SEQ ID NO: 2669731 - RNA, 19 nt, Homo sapiens
  misc_RNA (1)...(19): siRNA sense strand
gagccugaguugcacggaa

SEQ ID NO: 2669732 - RNA, 19 nt, Homo sapiens
  misc_RNA (1)...(19): siRNA sense strand
uggacaacaaugacuuaaa

SEQ ID NO: 2669733 - RNA, 19 nt, Homo sapiens
  misc_RNA (1)...(19): siRNA sense strand
agagaucagcaaacacaaa

SEQ ID NO: 2669734 - RNA, 19 nt, Homo sapiens
  misc_RNA (1)...(19): siRNA sense strand
aagcaagcacaauagaaau

SEQ ID NO: 2669735 - RNA, 19 nt, Homo sapiens
  misc_RNA (1)...(19): siRNA sense strand
gggaagagaaggagcaucc

SEQ ID NO: 2669736 - RNA, 19 nt, Homo sapiens
  misc_RNA (1)...(19): siRNA sense strand
uggaaccagccaaggaaau

SEQ ID NO: 2669737 - RNA, 19 nt, Homo sapiens
  misc_RNA (1)...(19): siRNA sense strand
gcacacuggaagacaaguu

SEQ ID NO: 2669738 - RNA, 19 nt, Homo sapiens
  misc_RNA (1)...(19): siRNA sense strand
aggaagaggaagaaagcag

SEQ ID NO: 2669739 - RNA, 19 nt, Homo sapiens
  misc_RNA (1)...(19): siRNA sense strand
ccgaaaaucaccagugcuu

SEQ ID NO: 2669740 - RNA, 19 nt, Homo sapiens
  misc_RNA (1)...(19): siRNA sense strand
uaacaagaaccgagggcuc

SEQ ID NO: 2669741 - RNA, 19 nt, Homo sapiens
  misc_RNA (1)...(19): siRNA sense strand
auucauucaaggagaacau

SEQ ID NO: 2669742 - RNA, 19 nt, Homo sapiens
  misc_RNA (1)...(19): siRNA sense strand
gcacgggcacacuggaaga

SEQ ID NO: 2669743 - RNA, 19 nt, Homo sapiens
  misc_RNA (1)...(19): siRNA sense strand
uugaucagucaguuagaaa

SEQ ID NO: 2669744 - RNA, 19 nt, Homo sapiens
  misc_RNA (1)...(19): siRNA sense strand
uggaacugggaaugaguau

SEQ ID NO: 2669745 - RNA, 19 nt, Homo sapiens
  misc_RNA (1)...(19): siRNA sense strand
cugcaggcccucacaggaa

SEQ ID NO: 2669746 - RNA, 19 nt, Homo sapiens
  misc_RNA (1)...(19): siRNA sense strand
gggcaccgguacagagauc

SEQ ID NO: 2669747 - RNA, 19 nt, Homo sapiens
  misc_RNA (1)...(19): siRNA sense strand
cgguacagagaucagcaaa

SEQ ID NO: 2669748 - RNA, 19 nt, Homo sapiens
  misc_RNA (1)...(19): siRNA sense strand
gaucagucaguuagaaagu

SEQ ID NO: 2669749 - RNA, 19 nt, Homo sapiens
  misc_RNA (1)...(19): siRNA sense strand
augaaagaguuaagcguga

SEQ ID NO: 2669750 - RNA, 19 nt, Homo sapiens
  misc_RNA (1)...(19): siRNA sense strand
gcgaagagcacuuggcgga

SEQ ID NO: 2669751 - RNA, 19 nt, Homo sapiens
  misc_RNA (1)...(19): siRNA sense strand
gaggauucccugaggccua

SEQ ID NO: 2669752 - RNA, 19 nt, Homo sapiens
  misc_RNA (1)...(19): siRNA sense strand
agguggagaagcaggacaa

SEQ ID NO: 2669753 - RNA, 19 nt, Homo sapiens
  misc_RNA (1)...(19): siRNA sense strand
aguaauggccacaggaaac

SEQ ID NO: 2669754 - RNA, 19 nt, Homo sapiens
  misc_RNA (1)...(19): siRNA sense strand
cuucaugcacagagcaaca

SEQ ID NO: 2669755 - RNA, 19 nt, Homo sapiens
  misc_RNA (1)...(19): siRNA sense strand
gaaaugagacagaacacca

SEQ ID NO: 2669756 - RNA, 19 nt, Homo sapiens
  misc_RNA (1)...(19): siRNA sense strand
gcuggagaaaugagacaga

SEQ ID NO: 2669757 - RNA, 19 nt, Homo sapiens
  misc_RNA (1)...(19): siRNA sense strand
aggcuggagaaaugagaca

SEQ ID NO: 2669758 - RNA, 19 nt, Homo sapiens
  misc_RNA (1)...(19): siRNA sense strand
gcgacgaagaacuugccaa

SEQ ID NO: 2669759 - RNA, 19 nt, Homo sapiens
  misc_RNA (1)...(19): siRNA sense strand
auacaaugaaugugggaaa

SEQ ID NO: 2669760 - RNA, 19 nt, Homo sapiens
  misc_RNA (1)...(19): siRNA sense strand
auguaaugaaugugggaaa

SEQ ID NO: 2669761 - RNA, 19 nt, Homo sapiens
  misc_RNA (1)...(19): siRNA sense strand
auguaguaaacgagggaaa

SEQ ID NO: 2669762 - RNA, 19 nt, Homo sapiens
  misc_RNA (1)...(19): siRNA sense strand
augugaugcuggagaacua

SEQ ID NO: 2669763 - RNA, 19 nt, Homo sapiens
  misc_RNA (1)...(19): siRNA sense strand
ugguaaugaauguggagaa

SEQ ID NO: 2669764 - RNA, 19 nt, Homo sapiens
  misc_RNA (1)...(19): siRNA sense strand
ggauguaaucaauguggaa

SEQ ID NO: 2669765 - RNA, 19 nt, Homo sapiens
  misc_RNA (1)...(19): siRNA sense strand
gggaaauuacucuggguga

SEQ ID NO: 2669766 - RNA, 19 nt, Homo sapiens
  misc_RNA (1)...(19): siRNA sense strand
cauggauauuagaggaaaa

SEQ ID NO: 2669767 - RNA, 19 nt, Homo sapiens
  misc_RNA (1)...(19): siRNA sense strand
aagaauacacacaggugaa

SEQ ID NO: 2669768 - RNA, 19 nt, Homo sapiens
  misc_RNA (1)...(19): siRNA sense strand
ggacagaaaaccugcaaau

SEQ ID NO: 2669769 - RNA, 19 nt, Homo sapiens
  misc_RNA (1)...(19): siRNA sense strand
augucaugaaugugggaaa

SEQ ID NO: 2669770 - RNA, 19 nt, Homo sapiens
  misc_RNA (1)...(19): siRNA sense strand
augucaugaaugugggaaa

SEQ ID NO: 2669771 - RNA, 19 nt, Homo sapiens
  misc_RNA (1)...(19): siRNA sense strand
gggaugugacugugggcuu

SEQ ID NO: 2669772 - RNA, 19 nt, Homo sapiens
  misc_RNA (1)...(19): siRNA sense strand
gggaacaaucuuuugaaua

SEQ ID NO: 2669773 - RNA, 19 nt, Homo sapiens
  misc_RNA (1)...(19): siRNA sense strand
acacaagacaucagagaac

SEQ ID NO: 2669774 - RNA, 19 nt, Homo sapiens
  misc_RNA (1)...(19): siRNA sense strand
guuuaacaaagguggaaaa

SEQ ID NO: 2669775 - RNA, 19 nt, Homo sapiens
  misc_RNA (1)...(19): siRNA sense strand
ccucauuuggcaucagaaa

SEQ ID NO: 2669776 - RNA, 19 nt, Homo sapiens
  misc_RNA (1)...(19): siRNA sense strand
auauaaugaguguggaaca

SEQ ID NO: 2669777 - RNA, 19 nt, Homo sapiens
  misc_RNA (1)...(19): siRNA sense strand
agguuacacaggacagaaa

SEQ ID NO: 2669778 - RNA, 19 nt, Homo sapiens
  misc_RNA (1)...(19): siRNA sense strand
ggagaaaggcgaggagcca

SEQ ID NO: 2669779 - RNA, 19 nt, Homo sapiens
  misc_RNA (1)...(19): siRNA sense strand
auauacugaacaugggaaa

SEQ ID NO: 2669780 - RNA, 19 nt, Homo sapiens
  misc_RNA (1)...(19): siRNA sense strand
gaauacacuuggggagaaa

SEQ ID NO: 2669781 - RNA, 19 nt, Homo sapiens
  misc_RNA (1)...(19): siRNA sense strand
ugucaugaaugugggaaau

SEQ ID NO: 2669782 - RNA, 19 nt, Homo sapiens
  misc_RNA (1)...(19): siRNA sense strand
uguaaugaaugugggaaaa

SEQ ID NO: 2669783 - RNA, 19 nt, Homo sapiens
  misc_RNA (1)...(19): siRNA sense strand
cauucugugugaagucaaa

SEQ ID NO: 2669784 - RNA, 19 nt, Homo sapiens
  misc_RNA (1)...(19): siRNA sense strand
cccuauaaauguaguaaac

SEQ ID NO: 2669785 - RNA, 19 nt, Homo sapiens
  misc_RNA (1)...(19): siRNA sense strand
ccucauuaaacaucaaaga

SEQ ID NO: 2669786 - RNA, 19 nt, Homo sapiens
  misc_RNA (1)...(19): siRNA sense strand
agugaaaagucaacccuua

SEQ ID NO: 2669787 - RNA, 19 nt, Homo sapiens
  misc_RNA (1)...(19): siRNA sense strand
ccucauuaaacaucaaaga

SEQ ID NO: 2669788 - RNA, 19 nt, Homo sapiens
  misc_RNA (1)...(19): siRNA sense strand
aggcgaggagccauggaua

SEQ ID NO: 2669789 - RNA, 19 nt, Homo sapiens
  misc_RNA (1)...(19): siRNA sense strand
ggcgaggagccauggauau

SEQ ID NO: 2669790 - RNA, 19 nt, Homo sapiens
  misc_RNA (1)...(19): siRNA sense strand
gccauggauauuagaggaa

SEQ ID NO: 2669791 - RNA, 19 nt, Homo sapiens
  misc_RNA (1)...(19): siRNA sense strand
gcgaggagccauggauauu

SEQ ID NO: 2669792 - RNA, 19 nt, Homo sapiens
  misc_RNA (1)...(19): siRNA sense strand
ccauggauauuagaggaaa

SEQ ID NO: 2669793 - RNA, 19 nt, Homo sapiens
  misc_RNA (1)...(19): siRNA sense strand
acauaagagagguuacaca

SEQ ID NO: 2669794 - RNA, 19 nt, Homo sapiens
  misc_RNA (1)...(19): siRNA sense strand
ugucaugaaugugggaaga

SEQ ID NO: 2669795 - RNA, 19 nt, Homo sapiens
  misc_RNA (1)...(19): siRNA sense strand
ugucaugaaugugggaaaa

SEQ ID NO: 2669796 - RNA, 19 nt, Homo sapiens
  misc_RNA (1)...(19): siRNA sense strand
agucaaaacucauugcaca

SEQ ID NO: 2669797 - RNA, 19 nt, Homo sapiens
  misc_RNA (1)...(19): siRNA sense strand
uccuaaaccagaagugauu

SEQ ID NO: 2669798 - RNA, 19 nt, Homo sapiens
  misc_RNA (1)...(19): siRNA sense strand
acagaaaaccugcaaauau

SEQ ID NO: 2669799 - RNA, 19 nt, Homo sapiens
  misc_RNA (1)...(19): siRNA sense strand
gagaaaauaucuuugagga

SEQ ID NO: 2669800 - RNA, 19 nt, Homo sapiens
  misc_RNA (1)...(19): siRNA sense strand
cauucagccagaaguuaaa

SEQ ID NO: 2669801 - RNA, 19 nt, Homo sapiens
  misc_RNA (1)...(19): siRNA sense strand
uauaaugaguguggaacau

SEQ ID NO: 2669802 - RNA, 19 nt, Homo sapiens
  misc_RNA (1)...(19): siRNA sense strand
gugggaaauccuucaguga

SEQ ID NO: 2669803 - RNA, 19 nt, Homo sapiens
  misc_RNA (1)...(19): siRNA sense strand
ggagaaagagaaagagcca

SEQ ID NO: 2669804 - RNA, 19 nt, Homo sapiens
  misc_RNA (1)...(19): siRNA sense strand
uugugaagucgguggcaua

SEQ ID NO: 2669805 - RNA, 19 nt, Homo sapiens
  misc_RNA (1)...(19): siRNA sense strand
ccuucaaacuguagcagca

SEQ ID NO: 2669806 - RNA, 19 nt, Homo sapiens
  misc_RNA (1)...(19): siRNA sense strand
cggagucagaacagagcaa

SEQ ID NO: 2669807 - RNA, 19 nt, Homo sapiens
  misc_RNA (1)...(19): siRNA sense strand
cuuaauggcuccuccgcua

SEQ ID NO: 2669808 - RNA, 19 nt, Homo sapiens
  misc_RNA (1)...(19): siRNA sense strand
gagucagaacagagcaaga

SEQ ID NO: 2669809 - RNA, 19 nt, Homo sapiens
  misc_RNA (1)...(19): siRNA sense strand
acaacaaccaggagaucau

SEQ ID NO: 2669810 - RNA, 19 nt, Homo sapiens
  misc_RNA (1)...(19): siRNA sense strand
ccuuaaugaaccaaccaua

SEQ ID NO: 2669811 - RNA, 19 nt, Homo sapiens
  misc_RNA (1)...(19): siRNA sense strand
guuugaagaaugcaggcaa

SEQ ID NO: 2669812 - RNA, 19 nt, Homo sapiens
  misc_RNA (1)...(19): siRNA sense strand
ucuacgagggccaggacaa

SEQ ID NO: 2669813 - RNA, 19 nt, Homo sapiens
  misc_RNA (1)...(19): siRNA sense strand
uuguggacuuuguggagaa

SEQ ID NO: 2669814 - RNA, 19 nt, Homo sapiens
  misc_RNA (1)...(19): siRNA sense strand
acggaaugccucacaacaa

SEQ ID NO: 2669815 - RNA, 19 nt, Homo sapiens
  misc_RNA (1)...(19): siRNA sense strand
ccuacaaauccaagcaguu

SEQ ID NO: 2669816 - RNA, 19 nt, Homo sapiens
  misc_RNA (1)...(19): siRNA sense strand
uuguggagaaagagaaaga

SEQ ID NO: 2669817 - RNA, 19 nt, Homo sapiens
  misc_RNA (1)...(19): siRNA sense strand
cagucaacguggacggcca

SEQ ID NO: 2669818 - RNA, 19 nt, Homo sapiens
  misc_RNA (1)...(19): siRNA sense strand
guggaagccuuauacggaa

SEQ ID NO: 2669819 - RNA, 19 nt, Homo sapiens
  misc_RNA (1)...(19): siRNA sense strand
aagagaaagagccaaacaa

SEQ ID NO: 2669820 - RNA, 19 nt, Homo sapiens
  misc_RNA (1)...(19): siRNA sense strand
cgacaacagucaacgugga

SEQ ID NO: 2669821 - RNA, 19 nt, Homo sapiens
  misc_RNA (1)...(19): siRNA sense strand
caugaauggauauggaagu

SEQ ID NO: 2669822 - RNA, 19 nt, Homo sapiens
  misc_RNA (1)...(19): siRNA sense strand
uggaagccuuauacggaau

SEQ ID NO: 2669823 - RNA, 19 nt, Homo sapiens
  misc_RNA (1)...(19): siRNA sense strand
agagccaaacaacgagaaa

SEQ ID NO: 2669824 - RNA, 19 nt, Homo sapiens
  misc_RNA (1)...(19): siRNA sense strand
cagaaaagcuggagaacaa

SEQ ID NO: 2669825 - RNA, 19 nt, Homo sapiens
  misc_RNA (1)...(19): siRNA sense strand
gcaaggagguagaaguaaa

SEQ ID NO: 2669826 - RNA, 19 nt, Homo sapiens
  misc_RNA (1)...(19): siRNA sense strand
aaacacaacuggugaauaa

SEQ ID NO: 2669827 - RNA, 19 nt, Homo sapiens
  misc_RNA (1)...(19): siRNA sense strand
aaucagagguugacaaaua

SEQ ID NO: 2669828 - RNA, 19 nt, Homo sapiens
  misc_RNA (1)...(19): siRNA sense strand
gaugauugguccagggaua

SEQ ID NO: 2669829 - RNA, 19 nt, Homo sapiens
  misc_RNA (1)...(19): siRNA sense strand
ucaagaagcugaagacaaa

SEQ ID NO: 2669830 - RNA, 19 nt, Homo sapiens
  misc_RNA (1)...(19): siRNA sense strand
gcaaaguagugaaacaaua

SEQ ID NO: 2669831 - RNA, 19 nt, Homo sapiens
  misc_RNA (1)...(19): siRNA sense strand
ugauaaacugugagaguaa

SEQ ID NO: 2669832 - RNA, 19 nt, Homo sapiens
  misc_RNA (1)...(19): siRNA sense strand
gcacagaauagcagaagaa

SEQ ID NO: 2669833 - RNA, 19 nt, Homo sapiens
  misc_RNA (1)...(19): siRNA sense strand
gaugaaaggaaaugugaaa

SEQ ID NO: 2669834 - RNA, 19 nt, Homo sapiens
  misc_RNA (1)...(19): siRNA sense strand
gguacaaauaggugacaaa

SEQ ID NO: 2669835 - RNA, 19 nt, Homo sapiens
  misc_RNA (1)...(19): siRNA sense strand
ggguauaguucuacgaaga

SEQ ID NO: 2669836 - RNA, 19 nt, Homo sapiens
  misc_RNA (1)...(19): siRNA sense strand
gcaacgaggucuagauuau

SEQ ID NO: 2669837 - RNA, 19 nt, Homo sapiens
  misc_RNA (1)...(19): siRNA sense strand
ugaaacaggugguggagaa

SEQ ID NO: 2669838 - RNA, 19 nt, Homo sapiens
  misc_RNA (1)...(19): siRNA sense strand
agcaggaaguggagggaaa

SEQ ID NO: 2669839 - RNA, 19 nt, Homo sapiens
  misc_RNA (1)...(19): siRNA sense strand
gcgcuuauuucgugacaaa

SEQ ID NO: 2669840 - RNA, 19 nt, Homo sapiens
  misc_RNA (1)...(19): siRNA sense strand
cugcagaagucuuaauuaa

SEQ ID NO: 2669841 - RNA, 19 nt, Homo sapiens
  misc_RNA (1)...(19): siRNA sense strand
gaugauguguggagacaaa

SEQ ID NO: 2669842 - RNA, 19 nt, Homo sapiens
  misc_RNA (1)...(19): siRNA sense strand
gcuaaaguauugagcagaa

SEQ ID NO: 2669843 - RNA, 19 nt, Homo sapiens
  misc_RNA (1)...(19): siRNA sense strand
ggaaagaaguagaacgacu

SEQ ID NO: 2669844 - RNA, 19 nt, Homo sapiens
  misc_RNA (1)...(19): siRNA sense strand
uaucacagcucuugaauua

SEQ ID NO: 2669845 - RNA, 19 nt, Homo sapiens
  misc_RNA (1)...(19): siRNA sense strand
gaucaggaauggagcagaa

SEQ ID NO: 2669846 - RNA, 19 nt, Homo sapiens
  misc_RNA (1)...(19): siRNA sense strand
uugcagaguuagaugaaua

SEQ ID NO: 2669847 - RNA, 19 nt, Homo sapiens
  misc_RNA (1)...(19): siRNA sense strand
gcaaagaauugauguuaga

SEQ ID NO: 2669848 - RNA, 19 nt, Homo sapiens
  misc_RNA (1)...(19): siRNA sense strand
agaaauuggugaugcaaau

SEQ ID NO: 2669849 - RNA, 19 nt, Homo sapiens
  misc_RNA (1)...(19): siRNA sense strand
uggaugaacugaacagaaa

SEQ ID NO: 2669850 - RNA, 19 nt, Homo sapiens
  misc_RNA (1)...(19): siRNA sense strand
gcuucaaagaugucagaaa

SEQ ID NO: 2669851 - RNA, 19 nt, Homo sapiens
  misc_RNA (1)...(19): siRNA sense strand
ucacagauaacuugggaua

SEQ ID NO: 2669852 - RNA, 19 nt, Homo sapiens
  misc_RNA (1)...(19): siRNA sense strand
ugaacuaagugcugcauua

SEQ ID NO: 2669853 - RNA, 19 nt, Homo sapiens
  misc_RNA (1)...(19): siRNA sense strand
ccaaagauuuccagaggau

SEQ ID NO: 2669854 - RNA, 19 nt, Homo sapiens
  misc_RNA (1)...(19): siRNA sense strand
acaaagagacacuggaaau

SEQ ID NO: 2669855 - RNA, 19 nt, Homo sapiens
  misc_RNA (1)...(19): siRNA sense strand
gguaaagcguccaacuaua

SEQ ID NO: 2669856 - RNA, 19 nt, Homo sapiens
  misc_RNA (1)...(19): siRNA sense strand
augaauaccugcagaauuu

SEQ ID NO: 2669857 - RNA, 19 nt, Homo sapiens
  misc_RNA (1)...(19): siRNA sense strand
cauuaguaguagcaagaaa

SEQ ID NO: 2669858 - RNA, 19 nt, Homo sapiens
  misc_RNA (1)...(19): siRNA sense strand
ugaaagaaguggaauauga

SEQ ID NO: 2669859 - RNA, 19 nt, Homo sapiens
  misc_RNA (1)...(19): siRNA sense strand
gcucagacauauuagacaa

SEQ ID NO: 2669860 - RNA, 19 nt, Homo sapiens
  misc_RNA (1)...(19): siRNA sense strand
cggcauaauucaggagcaa

SEQ ID NO: 2669861 - RNA, 19 nt, Homo sapiens
  misc_RNA (1)...(19): siRNA sense strand
gauaauggauucugcaaau

SEQ ID NO: 2669862 - RNA, 19 nt, Homo sapiens
  misc_RNA (1)...(19): siRNA sense strand
cagaauagcagaagaaguu

SEQ ID NO: 2669863 - RNA, 19 nt, Homo sapiens
  misc_RNA (1)...(19): siRNA sense strand
cauaaggaauggauuguaa

SEQ ID NO: 2669864 - RNA, 19 nt, Homo sapiens
  misc_RNA (1)...(19): siRNA sense strand
ggaagaaauuggugaugca

SEQ ID NO: 2669865 - RNA, 19 nt, Homo sapiens
  misc_RNA (1)...(19): siRNA sense strand
ccauaauauugauguggua

SEQ ID NO: 2669866 - RNA, 19 nt, Homo sapiens
  misc_RNA (1)...(19): siRNA sense strand
cagucaagucugaagauaa

SEQ ID NO: 2669867 - RNA, 19 nt, Homo sapiens
  misc_RNA (1)...(19): siRNA sense strand
caucauaggugguucauuu

SEQ ID NO: 2669868 - RNA, 19 nt, Homo sapiens
  misc_RNA (1)...(19): siRNA sense strand
ggugaauaaguuagagcaa

SEQ ID NO: 2669869 - RNA, 19 nt, Homo sapiens
  misc_RNA (1)...(19): siRNA sense strand
gguuauggaggaagacaaa

SEQ ID NO: 2669870 - RNA, 19 nt, Homo sapiens
  misc_RNA (1)...(19): siRNA sense strand
caacauaugugcuuaagaa

SEQ ID NO: 2669871 - RNA, 19 nt, Homo sapiens
  misc_RNA (1)...(19): siRNA sense strand
uggaaaaccacuuggaaaa

SEQ ID NO: 2669872 - RNA, 19 nt, Homo sapiens
  misc_RNA (1)...(19): siRNA sense strand
ggauauucaaucagguuua

SEQ ID NO: 2669873 - RNA, 19 nt, Homo sapiens
  misc_RNA (1)...(19): siRNA sense strand
auucaaagucagaggccaa

SEQ ID NO: 2669874 - RNA, 19 nt, Homo sapiens
  misc_RNA (1)...(19): siRNA sense strand
uugaaagccaagugggaua

SEQ ID NO: 2669875 - RNA, 19 nt, Homo sapiens
  misc_RNA (1)...(19): siRNA sense strand
aaacagaacuugaaagacu

SEQ ID NO: 2669876 - RNA, 19 nt, Homo sapiens
  misc_RNA (1)...(19): siRNA sense strand
gaagaaaacugaagacaga

SEQ ID NO: 2669877 - RNA, 19 nt, Homo sapiens
  misc_RNA (1)...(19): siRNA sense strand
cagagaagcuuuacgugaa

SEQ ID NO: 2669878 - RNA, 19 nt, Homo sapiens
  misc_RNA (1)...(19): siRNA sense strand
caauagagucacaacauua

SEQ ID NO: 2669879 - RNA, 19 nt, Homo sapiens
  misc_RNA (1)...(19): siRNA sense strand
cuucaaagaugucagaaau

SEQ ID NO: 2669880 - RNA, 19 nt, Homo sapiens
  misc_RNA (1)...(19): siRNA sense strand
cuuaugaauaucaggguaa

SEQ ID NO: 2669881 - RNA, 19 nt, Homo sapiens
  misc_RNA (1)...(19): siRNA sense strand
gaacaauucaugagaaguu

SEQ ID NO: 2669882 - RNA, 19 nt, Homo sapiens
  misc_RNA (1)...(19): siRNA sense strand
ccugcugaauauagaaaua

SEQ ID NO: 2669883 - RNA, 19 nt, Homo sapiens
  misc_RNA (1)...(19): siRNA sense strand
aggcaaauacuuaggugaa

SEQ ID NO: 2669884 - RNA, 19 nt, Homo sapiens
  misc_RNA (1)...(19): siRNA sense strand
aagaaagacaauagaguca

SEQ ID NO: 2669885 - RNA, 19 nt, Homo sapiens
  misc_RNA (1)...(19): siRNA sense strand
uugaagugaugaaaggaaa

SEQ ID NO: 2669886 - RNA, 19 nt, Homo sapiens
  misc_RNA (1)...(19): siRNA sense strand
acacagaaugcuaaugaaa

SEQ ID NO: 2669887 - RNA, 19 nt, Homo sapiens
  misc_RNA (1)...(19): siRNA sense strand
gaaagagagcaguuacaaa

SEQ ID NO: 2669888 - RNA, 19 nt, Homo sapiens
  misc_RNA (1)...(19): siRNA sense strand
aagagagaguguugaagaa

SEQ ID NO: 2669889 - RNA, 19 nt, Homo sapiens
  misc_RNA (1)...(19): siRNA sense strand
cugccaaacuugaggcuga

SEQ ID NO: 2669890 - RNA, 19 nt, Homo sapiens
  misc_RNA (1)...(19): siRNA sense strand
guaaagaaagagccaauua

SEQ ID NO: 2669891 - RNA, 19 nt, Homo sapiens
  misc_RNA (1)...(19): siRNA sense strand
cuggaaagauggauuacaa

SEQ ID NO: 2669892 - RNA, 19 nt, Homo sapiens
  misc_RNA (1)...(19): siRNA sense strand
ccugauguaauuagagaua

SEQ ID NO: 2669893 - RNA, 19 nt, Homo sapiens
  misc_RNA (1)...(19): siRNA sense strand
agguguaagagaagacaua

SEQ ID NO: 2669894 - RNA, 19 nt, Homo sapiens
  misc_RNA (1)...(19): siRNA sense strand
ccaaauuucccuugaucaa

SEQ ID NO: 2669895 - RNA, 19 nt, Homo sapiens
  misc_RNA (1)...(19): siRNA sense strand
guuccaaauuugauagaga

SEQ ID NO: 2669896 - RNA, 19 nt, Homo sapiens
  misc_RNA (1)...(19): siRNA sense strand
aguuaaugauggaaaguca

SEQ ID NO: 2669897 - RNA, 19 nt, Homo sapiens
  misc_RNA (1)...(19): siRNA sense strand
gaugggacuuggaggaaau

SEQ ID NO: 2669898 - RNA, 19 nt, Homo sapiens
  misc_RNA (1)...(19): siRNA sense strand
gaugucagcucauggauaa

SEQ ID NO: 2669899 - RNA, 19 nt, Homo sapiens
  misc_RNA (1)...(19): siRNA sense strand
aaugagaauuugccagaaa

SEQ ID NO: 2669900 - RNA, 19 nt, Homo sapiens
  misc_RNA (1)...(19): siRNA sense strand
gggcuaaauauuauagaga

SEQ ID NO: 2669901 - RNA, 19 nt, Homo sapiens
  misc_RNA (1)...(19): siRNA sense strand
gggugaggcaggagaugaa

SEQ ID NO: 2669902 - RNA, 19 nt, Homo sapiens
  misc_RNA (1)...(19): siRNA sense strand
gaacuaugaagcugauuaa

SEQ ID NO: 2669903 - RNA, 19 nt, Homo sapiens
  misc_RNA (1)...(19): siRNA sense strand
cuggcaaaguagugaaaca

SEQ ID NO: 2669904 - RNA, 19 nt, Homo sapiens
  misc_RNA (1)...(19): siRNA sense strand
gaguauaugucuaggauag

SEQ ID NO: 2669905 - RNA, 19 nt, Homo sapiens
  misc_RNA (1)...(19): siRNA sense strand
gcagaaacuuugaucccaa

SEQ ID NO: 2669906 - RNA, 19 nt, Homo sapiens
  misc_RNA (1)...(19): siRNA sense strand
gagacaugguugaaugauu

SEQ ID NO: 2669907 - RNA, 19 nt, Homo sapiens
  misc_RNA (1)...(19): siRNA sense strand
auggaaaggucgacugcaa

SEQ ID NO: 2669908 - RNA, 19 nt, Homo sapiens
  misc_RNA (1)...(19): siRNA sense strand
ucgauuagacuuugagaau

SEQ ID NO: 2669909 - RNA, 19 nt, Homo sapiens
  misc_RNA (1)...(19): siRNA sense strand
gguuugaugcacugauaaa

SEQ ID NO: 2669910 - RNA, 19 nt, Homo sapiens
  misc_RNA (1)...(19): siRNA sense strand
ucagauaguuucuacguua

SEQ ID NO: 2669911 - RNA, 19 nt, Homo sapiens
  misc_RNA (1)...(19): siRNA sense strand
ggaucaagcuucacaagau

SEQ ID NO: 2669912 - RNA, 19 nt, Homo sapiens
  misc_RNA (1)...(19): siRNA sense strand
aagcaaggcacaagaaaca

SEQ ID NO: 2669913 - RNA, 19 nt, Homo sapiens
  misc_RNA (1)...(19): siRNA sense strand
gaacauaagagauggaaug

SEQ ID NO: 2669914 - RNA, 19 nt, Homo sapiens
  misc_RNA (1)...(19): siRNA sense strand
agagauggaugguguagaa

SEQ ID NO: 2669915 - RNA, 19 nt, Homo sapiens
  misc_RNA (1)...(19): siRNA sense strand
gggaggagcugcagaccuu

SEQ ID NO: 2669916 - RNA, 19 nt, Homo sapiens
  misc_RNA (1)...(19): siRNA sense strand
agucagagccggagccaga

SEQ ID NO: 2669917 - RNA, 19 nt, Homo sapiens
  misc_RNA (1)...(19): siRNA sense strand
ggaagaaacccaaggcucu

SEQ ID NO: 2669918 - RNA, 19 nt, Homo sapiens
  misc_RNA (1)...(19): siRNA sense strand
cgacagauauuacaacgaa

SEQ ID NO: 2669919 - RNA, 19 nt, Homo sapiens
  misc_RNA (1)...(19): siRNA sense strand
aagugaagcuucuggggaa

SEQ ID NO: 2669920 - RNA, 19 nt, Homo sapiens
  misc_RNA (1)...(19): siRNA sense strand
cgccaaugccugagagaag

SEQ ID NO: 2669921 - RNA, 19 nt, Homo sapiens
  misc_RNA (1)...(19): siRNA sense strand
agccggagccagagccaaa

SEQ ID NO: 2669922 - RNA, 19 nt, Homo sapiens
  misc_RNA (1)...(19): siRNA sense strand
ccaacaucccucaggagau

SEQ ID NO: 2669923 - RNA, 19 nt, Homo sapiens
  misc_RNA (1)...(19): siRNA sense strand
gaggcaaagugaagcuucu

SEQ ID NO: 2669924 - RNA, 19 nt, Homo sapiens
  misc_RNA (1)...(19): siRNA sense strand
gguucaacuuugugagaaa

SEQ ID NO: 2669925 - RNA, 19 nt, Homo sapiens
  misc_RNA (1)...(19): siRNA sense strand
aaugaaauccagugggaaa

SEQ ID NO: 2669926 - RNA, 19 nt, Homo sapiens
  misc_RNA (1)...(19): siRNA sense strand
uugcagaauacaaggaaua

SEQ ID NO: 2669927 - RNA, 19 nt, Homo sapiens
  misc_RNA (1)...(19): siRNA sense strand
acagauaggugcagcaaaa

SEQ ID NO: 2669928 - RNA, 19 nt, Homo sapiens
  misc_RNA (1)...(19): siRNA sense strand
ggaaagaagaaguuugaca

SEQ ID NO: 2669929 - RNA, 19 nt, Homo sapiens
  misc_RNA (1)...(19): siRNA sense strand
acaaauugaccgagaacau

SEQ ID NO: 2669930 - RNA, 19 nt, Homo sapiens
  misc_RNA (1)...(19): siRNA sense strand
gacaagagguagagcgguu

SEQ ID NO: 2669931 - RNA, 19 nt, Homo sapiens
  misc_RNA (1)...(19): siRNA sense strand
gaaagaagaaguuugacaa

SEQ ID NO: 2669932 - RNA, 19 nt, Homo sapiens
  misc_RNA (1)...(19): siRNA sense strand
ggguggacauugugguauu

SEQ ID NO: 2669933 - RNA, 19 nt, Homo sapiens
  misc_RNA (1)...(19): siRNA sense strand
guuacuagcucaccggaaa

SEQ ID NO: 2669934 - RNA, 19 nt, Homo sapiens
  misc_RNA (1)...(19): siRNA sense strand
cucagaagcuaauaggaaa

SEQ ID NO: 2669935 - RNA, 19 nt, Homo sapiens
  misc_RNA (1)...(19): siRNA sense strand
ccgaauaggaggagugaac

SEQ ID NO: 2669936 - RNA, 19 nt, Homo sapiens
  misc_RNA (1)...(19): siRNA sense strand
cugaaggaaacaagagcua

SEQ ID NO: 2669937 - RNA, 19 nt, Homo sapiens
  misc_RNA (1)...(19): siRNA sense strand
ugacauagaaguaguugaa

SEQ ID NO: 2669938 - RNA, 19 nt, Homo sapiens
  misc_RNA (1)...(19): siRNA sense strand
cauuuaaauuuguccgcaa

SEQ ID NO: 2669939 - RNA, 19 nt, Homo sapiens
  misc_RNA (1)...(19): siRNA sense strand
ccgaaaaugugcaggagau

SEQ ID NO: 2669940 - RNA, 19 nt, Homo sapiens
  misc_RNA (1)...(19): siRNA sense strand
agaaguaguugaaaggcau

SEQ ID NO: 2669941 - RNA, 19 nt, Homo sapiens
  misc_RNA (1)...(19): siRNA sense strand
gauauugaacugugggaca

SEQ ID NO: 2669942 - RNA, 19 nt, Homo sapiens
  misc_RNA (1)...(19): siRNA sense strand
guagagcgguugaugcaaa

SEQ ID NO: 2669943 - RNA, 19 nt, Homo sapiens
  misc_RNA (1)...(19): siRNA sense strand
gaaaugaaauccaguggga

SEQ ID NO: 2669944 - RNA, 19 nt, Homo sapiens
  misc_RNA (1)...(19): siRNA sense strand
ucucagaagcuaauaggaa

SEQ ID NO: 2669945 - RNA, 19 nt, Homo sapiens
  misc_RNA (1)...(19): siRNA sense strand
guacauaugauaagggaag

SEQ ID NO: 2669946 - RNA, 19 nt, Homo sapiens
  misc_RNA (1)...(19): siRNA sense strand
caaaagauggaaagaagaa

SEQ ID NO: 2669947 - RNA, 19 nt, Homo sapiens
  misc_RNA (1)...(19): siRNA sense strand
gauaaaagcuaacggggca

SEQ ID NO: 2669948 - RNA, 19 nt, Homo sapiens
  misc_RNA (1)...(19): siRNA sense strand
caagaaagaagaaagcaca

SEQ ID NO: 2669949 - RNA, 19 nt, Homo sapiens
  misc_RNA (1)...(19): siRNA sense strand
ggacauugugguauuacua

SEQ ID NO: 2669950 - RNA, 19 nt, Homo sapiens
  misc_RNA (1)...(19): siRNA sense strand
ugucauuucuucagggcuu

SEQ ID NO: 2669951 - RNA, 19 nt, Homo sapiens
  misc_RNA (1)...(19): siRNA sense strand
ccauuauaagcaagaaaga

SEQ ID NO: 2669952 - RNA, 19 nt, Homo sapiens
  misc_RNA (1)...(19): siRNA sense strand
cgguugaugcaaaggauga

SEQ ID NO: 2669953 - RNA, 19 nt, Homo sapiens
  misc_RNA (1)...(19): siRNA sense strand
acauagaaguaguugaaag

SEQ ID NO: 2669954 - RNA, 19 nt, Homo sapiens
  misc_RNA (1)...(19): siRNA sense strand
agacagauucaauugacaa

SEQ ID NO: 2669955 - RNA, 19 nt, Homo sapiens
  misc_RNA (1)...(19): siRNA sense strand
cugcuuugacauagaagua

SEQ ID NO: 2669956 - RNA, 19 nt, Homo sapiens
  misc_RNA (1)...(19): siRNA sense strand
uagucaagaaagagccuua

SEQ ID NO: 2669957 - RNA, 19 nt, Homo sapiens
  misc_RNA (1)...(19): siRNA sense strand
cucaaaucuuggugucaua

SEQ ID NO: 2669958 - RNA, 19 nt, Homo sapiens
  misc_RNA (1)...(19): siRNA sense strand
caaccaagacagaugcaga

SEQ ID NO: 2669959 - RNA, 19 nt, Homo sapiens
  misc_RNA (1)...(19): siRNA sense strand
uagaaguaguugaaaggca

SEQ ID NO: 2669960 - RNA, 19 nt, Homo sapiens
  misc_RNA (1)...(19): siRNA sense strand
gcaagaaagaagaaagcac

SEQ ID NO: 2669961 - RNA, 19 nt, Homo sapiens
  misc_RNA (1)...(19): siRNA sense strand
cauucaagcuguggaaaca

SEQ ID NO: 2669962 - RNA, 19 nt, Homo sapiens
  misc_RNA (1)...(19): siRNA sense strand
gugcacaaauugccggaga

SEQ ID NO: 2669963 - RNA, 19 nt, Homo sapiens
  misc_RNA (1)...(19): siRNA sense strand
auacacaaauugaccgaga

SEQ ID NO: 2669964 - RNA, 19 nt, Homo sapiens
  misc_RNA (1)...(19): siRNA sense strand
agaagaaagcacaggauug

SEQ ID NO: 2669965 - RNA, 19 nt, Homo sapiens
  misc_RNA (1)...(19): siRNA sense strand
ugggacaauaagacgauaa

SEQ ID NO: 2669966 - RNA, 19 nt, Homo sapiens
  misc_RNA (1)...(19): siRNA sense strand
ccucaggugccuugcagaa

SEQ ID NO: 2669967 - RNA, 19 nt, Homo sapiens
  misc_RNA (1)...(19): siRNA sense strand
ccaugagggauaugaacuu

SEQ ID NO: 2669968 - RNA, 19 nt, Homo sapiens
  misc_RNA (1)...(19): siRNA sense strand
aggaauuugcaccguauaa

SEQ ID NO: 2669969 - RNA, 19 nt, Homo sapiens
  misc_RNA (1)...(19): siRNA sense strand
ucuaaugagagcacaggaa

SEQ ID NO: 2669970 - RNA, 19 nt, Homo sapiens
  misc_RNA (1)...(19): siRNA sense strand
uaaugagagcacaggaaga

SEQ ID NO: 2669971 - RNA, 19 nt, Homo sapiens
  misc_RNA (1)...(19): siRNA sense strand
ccgaaggacacgagcaauc

SEQ ID NO: 2669972 - RNA, 19 nt, Homo sapiens
  misc_RNA (1)...(19): siRNA sense strand
aauugcaccacuugagaaa

SEQ ID NO: 2669973 - RNA, 19 nt, Homo sapiens
  misc_RNA (1)...(19): siRNA sense strand
uugcaccacuugagaaauu

SEQ ID NO: 2669974 - RNA, 19 nt, Homo sapiens
  misc_RNA (1)...(19): siRNA sense strand
aaaaugugcaggagauuaa

SEQ ID NO: 2669975 - RNA, 19 nt, Homo sapiens
  misc_RNA (1)...(19): siRNA sense strand
auucaagagguccaagaaa

SEQ ID NO: 2669976 - RNA, 19 nt, Homo sapiens
  misc_RNA (1)...(19): siRNA sense strand
uucaagagguccaagaaaa

SEQ ID NO: 2669977 - RNA, 19 nt, Homo sapiens
  misc_RNA (1)...(19): siRNA sense strand
guugaaaggcaugggauca

SEQ ID NO: 2669978 - RNA, 19 nt, Homo sapiens
  misc_RNA (1)...(19): siRNA sense strand
auauugaacugugggacaa

SEQ ID NO: 2669979 - RNA, 19 nt, Homo sapiens
  misc_RNA (1)...(19): siRNA sense strand
gcaaaagauggaaagaaga

SEQ ID NO: 2669980 - RNA, 19 nt, Homo sapiens
  misc_RNA (1)...(19): siRNA sense strand
gcuguggaaacaagaggua

SEQ ID NO: 2669981 - RNA, 19 nt, Homo sapiens
  misc_RNA (1)...(19): siRNA sense strand
agcaacagcugcaguucaa

SEQ ID NO: 2669982 - RNA, 19 nt, Homo sapiens
  misc_RNA (1)...(19): siRNA sense strand
acgaaagacagauucaauu

SEQ ID NO: 2669983 - RNA, 19 nt, Homo sapiens
  misc_RNA (1)...(19): siRNA sense strand
gacagauucaauugacaaa

SEQ ID NO: 2669984 - RNA, 19 nt, Homo sapiens
  misc_RNA (1)...(19): siRNA sense strand
ccaaaacgcuaacgaugua

SEQ ID NO: 2669985 - RNA, 19 nt, Homo sapiens
  misc_RNA (1)...(19): siRNA sense strand
gcauucaagcuguggaaac

SEQ ID NO: 2669986 - RNA, 19 nt, Homo sapiens
  misc_RNA (1)...(19): siRNA sense strand
aagcccagagggagguaua

SEQ ID NO: 2669987 - RNA, 19 nt, Homo sapiens
  misc_RNA (1)...(19): siRNA sense strand
ucucugcagcugaaggaaa

SEQ ID NO: 2669988 - RNA, 19 nt, Homo sapiens
  misc_RNA (1)...(19): siRNA sense strand
aagaagaaagcacaggauu

SEQ ID NO: 2669989 - RNA, 19 nt, Homo sapiens
  misc_RNA (1)...(19): siRNA sense strand
ggaugaaaucugcuaacca

SEQ ID NO: 2669990 - RNA, 19 nt, Homo sapiens
  misc_RNA (1)...(19): siRNA sense strand
aaauucugauagagcacua

SEQ ID NO: 2669991 - RNA, 19 nt, Homo sapiens
  misc_RNA (1)...(19): siRNA sense strand
ccaggaauuugcaccguau

SEQ ID NO: 2669992 - RNA, 19 nt, Homo sapiens
  misc_RNA (1)...(19): siRNA sense strand
cguauaagcaacagcugca

SEQ ID NO: 2669993 - RNA, 19 nt, Homo sapiens
  misc_RNA (1)...(19): siRNA sense strand
cgauaaaggaggaccaguc

SEQ ID NO: 2669994 - RNA, 19 nt, Homo sapiens
  misc_RNA (1)...(19): siRNA sense strand
acauaugauaagggaagua

SEQ ID NO: 2669995 - RNA, 19 nt, Homo sapiens
  misc_RNA (1)...(19): siRNA sense strand
caccggaaauguuuaaauu

SEQ ID NO: 2669996 - RNA, 19 nt, Homo sapiens
  misc_RNA (1)...(19): siRNA sense strand
ggaugggaaggaaccguua

SEQ ID NO: 2669997 - RNA, 19 nt, Homo sapiens
  misc_RNA (1)...(19): siRNA sense strand
gcuuacagguagagaaaga

SEQ ID NO: 2669998 - RNA, 19 nt, Homo sapiens
  misc_RNA (1)...(19): siRNA sense strand
gaaagaggaugaaggccaa

SEQ ID NO: 2669999 - RNA, 19 nt, Homo sapiens
  misc_RNA (1)...(19): siRNA sense strand
cugcagauugaaagagaaa

SEQ ID NO: 2670000 - RNA, 19 nt, Homo sapiens
  misc_RNA (1)...(19): siRNA sense strand
augaagagaaagaggauga

SEQ ID NO: 2670001 - RNA, 19 nt, Homo sapiens
  misc_RNA (1)...(19): siRNA sense strand
acgcuuacagguagagaaa

SEQ ID NO: 2670002 - RNA, 19 nt, Homo sapiens
  misc_RNA (1)...(19): siRNA sense strand
agaaagaggaugaaggcca

SEQ ID NO: 2670003 - RNA, 19 nt, Homo sapiens
  misc_RNA (1)...(19): siRNA sense strand
ggaaaaugaacuuggucaa

SEQ ID NO: 2670004 - RNA, 19 nt, Homo sapiens
  misc_RNA (1)...(19): siRNA sense strand
uggaagaggaagaaaggga

SEQ ID NO: 2670005 - RNA, 19 nt, Homo sapiens
  misc_RNA (1)...(19): siRNA sense strand
gauccuuaacugaggucaa

SEQ ID NO: 2670006 - RNA, 19 nt, Homo sapiens
  misc_RNA (1)...(19): siRNA sense strand
aggucaagguggaagagga

SEQ ID NO: 2670007 - RNA, 19 nt, Homo sapiens
  misc_RNA (1)...(19): siRNA sense strand
ucaagguggaagaggaaga

SEQ ID NO: 2670008 - RNA, 19 nt, Homo sapiens
  misc_RNA (1)...(19): siRNA sense strand
acgccuacaaaucgagaaa

SEQ ID NO: 2670009 - RNA, 19 nt, Homo sapiens
  misc_RNA (1)...(19): siRNA sense strand
gugugaaugcuguaggaga

SEQ ID NO: 2670010 - RNA, 19 nt, Homo sapiens
  misc_RNA (1)...(19): siRNA sense strand
agagaaaaguugagguuac

SEQ ID NO: 2670011 - RNA, 19 nt, Homo sapiens
  misc_RNA (1)...(19): siRNA sense strand
agaacagaggacagggaca

SEQ ID NO: 2670012 - RNA, 19 nt, Homo sapiens
  misc_RNA (1)...(19): siRNA sense strand
ggaagaggaagaaagggau

SEQ ID NO: 2670013 - RNA, 19 nt, Homo sapiens
  misc_RNA (1)...(19): siRNA sense strand
uugaggaggaggaagaaau

SEQ ID NO: 2670014 - RNA, 19 nt, Homo sapiens
  misc_RNA (1)...(19): siRNA sense strand
uaacugaggucaaggugga

SEQ ID NO: 2670015 - RNA, 19 nt, Homo sapiens
  misc_RNA (1)...(19): siRNA sense strand
cagacuucgaauucagaaa

SEQ ID NO: 2670016 - RNA, 19 nt, Homo sapiens
  misc_RNA (1)...(19): siRNA sense strand
gaauucagaaagaaggaca

SEQ ID NO: 2670017 - RNA, 19 nt, Homo sapiens
  misc_RNA (1)...(19): siRNA sense strand
agguagagaaagacagacu

SEQ ID NO: 2670018 - RNA, 19 nt, Homo sapiens
  misc_RNA (1)...(19): siRNA sense strand
acauuaagcugguugguuc

SEQ ID NO: 2670019 - RNA, 19 nt, Homo sapiens
  misc_RNA (1)...(19): siRNA sense strand
auuccgaaaugaugcaaau

SEQ ID NO: 2670020 - RNA, 19 nt, Homo sapiens
  misc_RNA (1)...(19): siRNA sense strand
gaaagacagacuucgaauu

SEQ ID NO: 2670021 - RNA, 19 nt, Homo sapiens
  misc_RNA (1)...(19): siRNA sense strand
aaaggaacgcuuacaggua

SEQ ID NO: 2670022 - RNA, 19 nt, Homo sapiens
  misc_RNA (1)...(19): siRNA sense strand
ggagaacagaggacaggga

SEQ ID NO: 2670023 - RNA, 19 nt, Homo sapiens
  misc_RNA (1)...(19): siRNA sense strand
gaagaaagggauccgcaga

SEQ ID NO: 2670024 - RNA, 19 nt, Homo sapiens
  misc_RNA (1)...(19): siRNA sense strand
agaaagagaggcugcggca

SEQ ID NO: 2670025 - RNA, 19 nt, Homo sapiens
  misc_RNA (1)...(19): siRNA sense strand
cgaaaaggaaagaagucau

SEQ ID NO: 2670026 - RNA, 19 nt, Homo sapiens
  misc_RNA (1)...(19): siRNA sense strand
ugcuguaggagaaggagaa

SEQ ID NO: 2670027 - RNA, 19 nt, Homo sapiens
  misc_RNA (1)...(19): siRNA sense strand
ggcauuuagacauggaaca

SEQ ID NO: 2670028 - RNA, 19 nt, Homo sapiens
  misc_RNA (1)...(19): siRNA sense strand
gcauuuagacauggaacau

SEQ ID NO: 2670029 - RNA, 19 nt, Homo sapiens
  misc_RNA (1)...(19): siRNA sense strand
gggacagaggugaaaagaa

SEQ ID NO: 2670030 - RNA, 19 nt, Homo sapiens
  misc_RNA (1)...(19): siRNA sense strand
uugaaauugaggaggagga

SEQ ID NO: 2670031 - RNA, 19 nt, Homo sapiens
  misc_RNA (1)...(19): siRNA sense strand
gagaaggagcggcugcaga

SEQ ID NO: 2670032 - RNA, 19 nt, Homo sapiens
  misc_RNA (1)...(19): siRNA sense strand
cacugaagagauagaugaa

SEQ ID NO: 2670033 - RNA, 19 nt, Homo sapiens
  misc_RNA (1)...(19): siRNA sense strand
gcuucaaccacaggacaua

SEQ ID NO: 2670034 - RNA, 19 nt, Homo sapiens
  misc_RNA (1)...(19): siRNA sense strand
agaaagacagacuucgaau

SEQ ID NO: 2670035 - RNA, 19 nt, Homo sapiens
  misc_RNA (1)...(19): siRNA sense strand
acgucaaguuacaagggaa

SEQ ID NO: 2670036 - RNA, 19 nt, Homo sapiens
  misc_RNA (1)...(19): siRNA sense strand
uuacaagggaagaagcuga

SEQ ID NO: 2670037 - RNA, 19 nt, Homo sapiens
  misc_RNA (1)...(19): siRNA sense strand
cgucaaguuacaagggaag

SEQ ID NO: 2670038 - RNA, 19 nt, Homo sapiens
  misc_RNA (1)...(19): siRNA sense strand
ggacacaagugcaaauauu

SEQ ID NO: 2670039 - RNA, 19 nt, Homo sapiens
  misc_RNA (1)...(19): siRNA sense strand
ggacacaagucuaccaaga

SEQ ID NO: 2670040 - RNA, 19 nt, Homo sapiens
  misc_RNA (1)...(19): siRNA sense strand
ggugaaaaucugagaccaa

SEQ ID NO: 2670041 - RNA, 19 nt, Homo sapiens
  misc_RNA (1)...(19): siRNA sense strand
gcaaucagauccaagcaua

SEQ ID NO: 2670042 - RNA, 19 nt, Homo sapiens
  misc_RNA (1)...(19): siRNA sense strand
ggacaauauccuucaauga

SEQ ID NO: 2670043 - RNA, 19 nt, Homo sapiens
  misc_RNA (1)...(19): siRNA sense strand
uaucaagacaaccgagaaa

SEQ ID NO: 2670044 - RNA, 19 nt, Homo sapiens
  misc_RNA (1)...(19): siRNA sense strand
cgugccaugucuagaaaua

SEQ ID NO: 2670045 - RNA, 19 nt, Homo sapiens
  misc_RNA (1)...(19): siRNA sense strand
gcauaaggacacaagucua

SEQ ID NO: 2670046 - RNA, 19 nt, Homo sapiens
  misc_RNA (1)...(19): siRNA sense strand
acccacagcuagaggagaa

SEQ ID NO: 2670047 - RNA, 19 nt, Homo sapiens
  misc_RNA (1)...(19): siRNA sense strand
caaucagauccaagcauaa

SEQ ID NO: 2670048 - RNA, 19 nt, Homo sapiens
  misc_RNA (1)...(19): siRNA sense strand
aaugauaacuacagggacu

SEQ ID NO: 2670049 - RNA, 19 nt, Homo sapiens
  misc_RNA (1)...(19): siRNA sense strand
cgaaggaggacuggugaaa

SEQ ID NO: 2670050 - RNA, 19 nt, Homo sapiens
  misc_RNA (1)...(19): siRNA sense strand
ggauauuauuccauguuga

SEQ ID NO: 2670051 - RNA, 19 nt, Homo sapiens
  misc_RNA (1)...(19): siRNA sense strand
acucaagcgcaaugaaauu

SEQ ID NO: 2670052 - RNA, 19 nt, Homo sapiens
  misc_RNA (1)...(19): siRNA sense strand
ccacgagaauagacagcau

SEQ ID NO: 2670053 - RNA, 19 nt, Homo sapiens
  misc_RNA (1)...(19): siRNA sense strand
ccauauggaaagaagugua

SEQ ID NO: 2670054 - RNA, 19 nt, Homo sapiens
  misc_RNA (1)...(19): siRNA sense strand
ggaaagaaguguaccuaug

SEQ ID NO: 2670055 - RNA, 19 nt, Homo sapiens
  misc_RNA (1)...(19): siRNA sense strand
uagaaauacggcagccaaa

SEQ ID NO: 2670056 - RNA, 19 nt, Homo sapiens
  misc_RNA (1)...(19): siRNA sense strand
cguaaauuagagaaggaga

SEQ ID NO: 2670057 - RNA, 19 nt, Homo sapiens
  misc_RNA (1)...(19): siRNA sense strand
ugugagaauugucaugaaa

SEQ ID NO: 2670058 - RNA, 19 nt, Homo sapiens
  misc_RNA (1)...(19): siRNA sense strand
cgacaaagaaagccuuauu

SEQ ID NO: 2670059 - RNA, 19 nt, Homo sapiens
  misc_RNA (1)...(19): siRNA sense strand
aggagaauuugaaguguca

SEQ ID NO: 2670060 - RNA, 19 nt, Homo sapiens
  misc_RNA (1)...(19): siRNA sense strand
ggaucgacgccuaugggua

SEQ ID NO: 2670061 - RNA, 19 nt, Homo sapiens
  misc_RNA (1)...(19): siRNA sense strand
acuacagggacuuggcuaa

SEQ ID NO: 2670062 - RNA, 19 nt, Homo sapiens
  misc_RNA (1)...(19): siRNA sense strand
ccuucaaugaugauggcaa

SEQ ID NO: 2670063 - RNA, 19 nt, Homo sapiens
  misc_RNA (1)...(19): siRNA sense strand
augagaagccagaauggaa

SEQ ID NO: 2670064 - RNA, 19 nt, Homo sapiens
  misc_RNA (1)...(19): siRNA sense strand
ccaaagaggcaaucagauc

SEQ ID NO: 2670065 - RNA, 19 nt, Homo sapiens
  misc_RNA (1)...(19): siRNA sense strand
gcuaugggaucgacgccua

SEQ ID NO: 2670066 - RNA, 19 nt, Homo sapiens
  misc_RNA (1)...(19): siRNA sense strand
ccagaauggaagaaguuca

SEQ ID NO: 2670067 - RNA, 19 nt, Homo sapiens
  misc_RNA (1)...(19): siRNA sense strand
gauaauuuucugaggaaga

SEQ ID NO: 2670068 - RNA, 19 nt, Homo sapiens
  misc_RNA (1)...(19): siRNA sense strand
ccuauggacacaagugcaa

SEQ ID NO: 2670069 - RNA, 19 nt, Homo sapiens
  misc_RNA (1)...(19): siRNA sense strand
gaaauaaaagugaggcuga

SEQ ID NO: 2670070 - RNA, 19 nt, Homo sapiens
  misc_RNA (1)...(19): siRNA sense strand
aaauauuaccaucccgaaa

SEQ ID NO: 2670071 - RNA, 19 nt, Homo sapiens
  misc_RNA (1)...(19): siRNA sense strand
gcacuacaucuuuaagcaa

SEQ ID NO: 2670072 - RNA, 19 nt, Homo sapiens
  misc_RNA (1)...(19): siRNA sense strand
aaccaaaguuccaucacaa

SEQ ID NO: 2670073 - RNA, 19 nt, Homo sapiens
  misc_RNA (1)...(19): siRNA sense strand
agucagaacaauuggguag

SEQ ID NO: 2670074 - RNA, 19 nt, Homo sapiens
  misc_RNA (1)...(19): siRNA sense strand
acuuauuccuugcccgaua

SEQ ID NO: 2670075 - RNA, 19 nt, Homo sapiens
  misc_RNA (1)...(19): siRNA sense strand
ggaucaaagaccacaggga

SEQ ID NO: 2670076 - RNA, 19 nt, Homo sapiens
  misc_RNA (1)...(19): siRNA sense strand
uggaaagaggccacaaaga

SEQ ID NO: 2670077 - RNA, 19 nt, Homo sapiens
  misc_RNA (1)...(19): siRNA sense strand
cgccaaugccuuaugaaca

SEQ ID NO: 2670078 - RNA, 19 nt, Homo sapiens
  misc_RNA (1)...(19): siRNA sense strand
cuuaugaacaguauccaaa

SEQ ID NO: 2670079 - RNA, 19 nt, Homo sapiens
  misc_RNA (1)...(19): siRNA sense strand
gcaaaguuacagucacgaa

SEQ ID NO: 2670080 - RNA, 19 nt, Homo sapiens
  misc_RNA (1)...(19): siRNA sense strand
uggauaauuuucugaggaa

SEQ ID NO: 2670081 - RNA, 19 nt, Homo sapiens
  misc_RNA (1)...(19): siRNA sense strand
caaugaugauggcaaccaa

SEQ ID NO: 2670082 - RNA, 19 nt, Homo sapiens
  misc_RNA (1)...(19): siRNA sense strand
ugaucaugagucagaacaa

SEQ ID NO: 2670083 - RNA, 19 nt, Homo sapiens
  misc_RNA (1)...(19): siRNA sense strand
cucacauacucaagcgcaa

SEQ ID NO: 2670084 - RNA, 19 nt, Homo sapiens
  misc_RNA (1)...(19): siRNA sense strand
auccaaggaagcaaagaaa

SEQ ID NO: 2670085 - RNA, 19 nt, Homo sapiens
  misc_RNA (1)...(19): siRNA sense strand
ucaaagaccacagggacaa

SEQ ID NO: 2670086 - RNA, 19 nt, Homo sapiens
  misc_RNA (1)...(19): siRNA sense strand
acgaaggaggacuggugaa

SEQ ID NO: 2670087 - RNA, 19 nt, Homo sapiens
  misc_RNA (1)...(19): siRNA sense strand
ccagcuacuucuacugcaa

SEQ ID NO: 2670088 - RNA, 19 nt, Homo sapiens
  misc_RNA (1)...(19): siRNA sense strand
gcaaaaccccaaagcacua

SEQ ID NO: 2670089 - RNA, 19 nt, Homo sapiens
  misc_RNA (1)...(19): siRNA sense strand
aucaaagaccacagggaca

SEQ ID NO: 2670090 - RNA, 19 nt, Homo sapiens
  misc_RNA (1)...(19): siRNA sense strand
gugacuccuacguggguua

SEQ ID NO: 2670091 - RNA, 19 nt, Homo sapiens
  misc_RNA (1)...(19): siRNA sense strand
gaaggaucaccuagggcau

SEQ ID NO: 2670092 - RNA, 19 nt, Homo sapiens
  misc_RNA (1)...(19): siRNA sense strand
gaagaaaccuauuguuccu

SEQ ID NO: 2670093 - RNA, 19 nt, Homo sapiens
  misc_RNA (1)...(19): siRNA sense strand
gcaccaaggcugauagcac

SEQ ID NO: 2670094 - RNA, 19 nt, Homo sapiens
  misc_RNA (1)...(19): siRNA sense strand
gcuugauaacuaagacuca

SEQ ID NO: 2670095 - RNA, 19 nt, Homo sapiens
  misc_RNA (1)...(19): siRNA sense strand
ccugauguggugcgagaau

SEQ ID NO: 2670096 - RNA, 19 nt, Homo sapiens
  misc_RNA (1)...(19): siRNA sense strand
ucucauuacagaucaggaa

SEQ ID NO: 2670097 - RNA, 19 nt, Homo sapiens
  misc_RNA (1)...(19): siRNA sense strand
gagcaugagcugugggagc

SEQ ID NO: 2670098 - RNA, 19 nt, Homo sapiens
  misc_RNA (1)...(19): siRNA sense strand
ggcaaugagccauggaaac

SEQ ID NO: 2670099 - RNA, 19 nt, Homo sapiens
  misc_RNA (1)...(19): siRNA sense strand
ucauuacagaucaggaaau

SEQ ID NO: 2670100 - RNA, 19 nt, Homo sapiens
  misc_RNA (1)...(19): siRNA sense strand
cuucaaugaugauggcaac

SEQ ID NO: 2670101 - RNA, 19 nt, Homo sapiens
  misc_RNA (1)...(19): siRNA sense strand
cuuuaaaccugaagagucc

SEQ ID NO: 2670102 - RNA, 19 nt, Homo sapiens
  misc_RNA (1)...(19): siRNA sense strand
ucaaugauauuuugggaga

SEQ ID NO: 2670103 - RNA, 19 nt, Homo sapiens
  misc_RNA (1)...(19): siRNA sense strand
aggaaaugaugaagagaaa

SEQ ID NO: 2670104 - RNA, 19 nt, Homo sapiens
  misc_RNA (1)...(19): siRNA sense strand
acaucaaucuagagaaaga

SEQ ID NO: 2670105 - RNA, 19 nt, Homo sapiens
  misc_RNA (1)...(19): siRNA sense strand
cuguaauggaucaaggaaa

SEQ ID NO: 2670106 - RNA, 19 nt, Homo sapiens
  misc_RNA (1)...(19): siRNA sense strand
ggacagguauuuaaccaaa

SEQ ID NO: 2670107 - RNA, 19 nt, Homo sapiens
  misc_RNA (1)...(19): siRNA sense strand
acugauauguggacagcaa

SEQ ID NO: 2670108 - RNA, 19 nt, Homo sapiens
  misc_RNA (1)...(19): siRNA sense strand
agagaaugccucagauauu

SEQ ID NO: 2670109 - RNA, 19 nt, Homo sapiens
  misc_RNA (1)...(19): siRNA sense strand
cagccagaccagaggaaga

SEQ ID NO: 2670110 - RNA, 19 nt, Homo sapiens
  misc_RNA (1)...(19): siRNA sense strand
cagagaacuaaaagagaaa

SEQ ID NO: 2670111 - RNA, 19 nt, Homo sapiens
  misc_RNA (1)...(19): siRNA sense strand
agacuuaagcugugcauga

SEQ ID NO: 2670112 - RNA, 19 nt, Homo sapiens
  misc_RNA (1)...(19): siRNA sense strand
gugaaauccugcagagaac

SEQ ID NO: 2670113 - RNA, 19 nt, Homo sapiens
  misc_RNA (1)...(19): siRNA sense strand
ugagaauugccuuaggaua

SEQ ID NO: 2670114 - RNA, 19 nt, Homo sapiens
  misc_RNA (1)...(19): siRNA sense strand
ccuuaggauauuuggagaa

SEQ ID NO: 2670115 - RNA, 19 nt, Homo sapiens
  misc_RNA (1)...(19): siRNA sense strand
cagaccagaggaagagaaa

SEQ ID NO: 2670116 - RNA, 19 nt, Homo sapiens
  misc_RNA (1)...(19): siRNA sense strand
ggcauaagucuuugcaaau

SEQ ID NO: 2670117 - RNA, 19 nt, Homo sapiens
  misc_RNA (1)...(19): siRNA sense strand
agauuaaaccuuugcccaa

SEQ ID NO: 2670118 - RNA, 19 nt, Homo sapiens
  misc_RNA (1)...(19): siRNA sense strand
gaccagaggaagagaaaau

SEQ ID NO: 2670119 - RNA, 19 nt, Homo sapiens
  misc_RNA (1)...(19): siRNA sense strand
aaggaaaugaugaagagaa

SEQ ID NO: 2670120 - RNA, 19 nt, Homo sapiens
  misc_RNA (1)...(19): siRNA sense strand
agagagaaugccucagaua

SEQ ID NO: 2670121 - RNA, 19 nt, Homo sapiens
  misc_RNA (1)...(19): siRNA sense strand
agaugugacacuagagaga

SEQ ID NO: 2670122 - RNA, 19 nt, Homo sapiens
  misc_RNA (1)...(19): siRNA sense strand
augugacacuagagagaau

SEQ ID NO: 2670123 - RNA, 19 nt, Homo sapiens
  misc_RNA (1)...(19): siRNA sense strand
aauccaagccggugaacau

SEQ ID NO: 2670124 - RNA, 19 nt, Homo sapiens
  misc_RNA (1)...(19): siRNA sense strand
ugaagucacaugaggaaau

SEQ ID NO: 2670125 - RNA, 19 nt, Homo sapiens
  misc_RNA (1)...(19): siRNA sense strand
gguucucugccuugggaaa

SEQ ID NO: 2670126 - RNA, 19 nt, Homo sapiens
  misc_RNA (1)...(19): siRNA sense strand
guguggaugaagugggaga

SEQ ID NO: 2670127 - RNA, 19 nt, Homo sapiens
  misc_RNA (1)...(19): siRNA sense strand
gaguagugccacaaaccaa

SEQ ID NO: 2670128 - RNA, 19 nt, Homo sapiens
  misc_RNA (1)...(19): siRNA sense strand
augaagugggagaaggcaa

SEQ ID NO: 2670129 - RNA, 19 nt, Homo sapiens
  misc_RNA (1)...(19): siRNA sense strand
gauuaccaguuguggguca

SEQ ID NO: 2670130 - RNA, 19 nt, Homo sapiens
  misc_RNA (1)...(19): siRNA sense strand
cggccuacuaccagggaca

SEQ ID NO: 2670131 - RNA, 19 nt, Homo sapiens
  misc_RNA (1)...(19): siRNA sense strand
acucaaaacacuaagaaga

SEQ ID NO: 2670132 - RNA, 19 nt, Homo sapiens
  misc_RNA (1)...(19): siRNA sense strand
gcuuggaaaaugagcuaaa

SEQ ID NO: 2670133 - RNA, 19 nt, Homo sapiens
  misc_RNA (1)...(19): siRNA sense strand
aggacuacccgaagagcau

SEQ ID NO: 2670134 - RNA, 19 nt, Homo sapiens
  misc_RNA (1)...(19): siRNA sense strand
gugacuugguaaagaaacu

SEQ ID NO: 2670135 - RNA, 19 nt, Homo sapiens
  misc_RNA (1)...(19): siRNA sense strand
ccaacauagaagaccagaa

SEQ ID NO: 2670136 - RNA, 19 nt, Homo sapiens
  misc_RNA (1)...(19): siRNA sense strand
ugcauggagaggaggauua

SEQ ID NO: 2670137 - RNA, 19 nt, Homo sapiens
  misc_RNA (1)...(19): siRNA sense strand
auacaaagaaggacaccau

SEQ ID NO: 2670138 - RNA, 19 nt, Homo sapiens
  misc_RNA (1)...(19): siRNA sense strand
caucugucuuaaaggauuu

SEQ ID NO: 2670139 - RNA, 19 nt, Homo sapiens
  misc_RNA (1)...(19): siRNA sense strand
aaauacuguucaaaggcua

SEQ ID NO: 2670140 - RNA, 19 nt, Homo sapiens
  misc_RNA (1)...(19): siRNA sense strand
gccuauacaaagaaggaca

SEQ ID NO: 2670141 - RNA, 19 nt, Homo sapiens
  misc_RNA (1)...(19): siRNA sense strand
uagagaaagaaaaggacua

SEQ ID NO: 2670142 - RNA, 19 nt, Homo sapiens
  misc_RNA (1)...(19): siRNA sense strand
aaggaaaucacgugaaacu

SEQ ID NO: 2670143 - RNA, 19 nt, Homo sapiens
  misc_RNA (1)...(19): siRNA sense strand
gcgacauugaggacaggua

SEQ ID NO: 2670144 - RNA, 19 nt, Homo sapiens
  misc_RNA (1)...(19): siRNA sense strand
guuacacaacauugagcaa

SEQ ID NO: 2670145 - RNA, 19 nt, Homo sapiens
  misc_RNA (1)...(19): siRNA sense strand
ccagcacaugguugagaaa

SEQ ID NO: 2670146 - RNA, 19 nt, Homo sapiens
  misc_RNA (1)...(19): siRNA sense strand
aaugaaaacacuagcagaa

SEQ ID NO: 2670147 - RNA, 19 nt, Homo sapiens
  misc_RNA (1)...(19): siRNA sense strand
acucacugcaagaggaaca

SEQ ID NO: 2670148 - RNA, 19 nt, Homo sapiens
  misc_RNA (1)...(19): siRNA sense strand
cagcgaaugaaguuaucaa

SEQ ID NO: 2670149 - RNA, 19 nt, Homo sapiens
  misc_RNA (1)...(19): siRNA sense strand
ccuaugacagcuuggaaaa

SEQ ID NO: 2670150 - RNA, 19 nt, Homo sapiens
  misc_RNA (1)...(19): siRNA sense strand
cuuccaggacucagagaga

SEQ ID NO: 2670151 - RNA, 19 nt, Homo sapiens
  misc_RNA (1)...(19): siRNA sense strand
gcgaaugaaguuaucaaca

SEQ ID NO: 2670152 - RNA, 19 nt, Homo sapiens
  misc_RNA (1)...(19): siRNA sense strand
auuaccaaugcuagggaua

SEQ ID NO: 2670153 - RNA, 19 nt, Homo sapiens
  misc_RNA (1)...(19): siRNA sense strand
cgaaguacaccuagacugu

SEQ ID NO: 2670154 - RNA, 19 nt, Homo sapiens
  misc_RNA (1)...(19): siRNA sense strand
cugauugagaauugccuua

SEQ ID NO: 2670155 - RNA, 19 nt, Homo sapiens
  misc_RNA (1)...(19): siRNA sense strand
ccaggaggaaggaaagaca

SEQ ID NO: 2670156 - RNA, 19 nt, Homo sapiens
  misc_RNA (1)...(19): siRNA sense strand
gggaagaccuuucuccuga

SEQ ID NO: 2670157 - RNA, 19 nt, Homo sapiens
  misc_RNA (1)...(19): siRNA sense strand
aggacagcucuuuggaauu

SEQ ID NO: 2670158 - RNA, 19 nt, Homo sapiens
  misc_RNA (1)...(19): siRNA sense strand
ugugaaauccugcagagaa

SEQ ID NO: 2670159 - RNA, 19 nt, Homo sapiens
  misc_RNA (1)...(19): siRNA sense strand
acaccuagacugugaaucu

SEQ ID NO: 2670160 - RNA, 19 nt, Homo sapiens
  misc_RNA (1)...(19): siRNA sense strand
gucugguagugaaggaaau

SEQ ID NO: 2670161 - RNA, 19 nt, Homo sapiens
  misc_RNA (1)...(19): siRNA sense strand
uagaagaccagaaccgcaa

SEQ ID NO: 2670162 - RNA, 19 nt, Homo sapiens
  misc_RNA (1)...(19): siRNA sense strand
cgacauugaggacagguau

SEQ ID NO: 2670163 - RNA, 19 nt, Homo sapiens
  misc_RNA (1)...(19): siRNA sense strand
gggagaaggcaacaccaau

SEQ ID NO: 2670164 - RNA, 19 nt, Homo sapiens
  misc_RNA (1)...(19): siRNA sense strand
uggauaaagcccuacaaaa

SEQ ID NO: 2670165 - RNA, 19 nt, Homo sapiens
  misc_RNA (1)...(19): siRNA sense strand
ggcccauucuaaagaugaa

SEQ ID NO: 2670166 - RNA, 19 nt, Homo sapiens
  misc_RNA (1)...(19): siRNA sense strand
gguauuuaaccaaagacau

SEQ ID NO: 2670167 - RNA, 19 nt, Homo sapiens
  misc_RNA (1)...(19): siRNA sense strand
ugauucaggucauaagaca

SEQ ID NO: 2670168 - RNA, 19 nt, Homo sapiens
  misc_RNA (1)...(19): siRNA sense strand
aggaaaugaugaagagaaa

SEQ ID NO: 2670169 - RNA, 19 nt, Homo sapiens
  misc_RNA (1)...(19): siRNA sense strand
acaucaaucuagagaaaga

SEQ ID NO: 2670170 - RNA, 19 nt, Homo sapiens
  misc_RNA (1)...(19): siRNA sense strand
cuguaauggaucaaggaaa

SEQ ID NO: 2670171 - RNA, 19 nt, Homo sapiens
  misc_RNA (1)...(19): siRNA sense strand
ggacagguauuuaaccaaa

SEQ ID NO: 2670172 - RNA, 19 nt, Homo sapiens
  misc_RNA (1)...(19): siRNA sense strand
acugauauguggacagcaa

SEQ ID NO: 2670173 - RNA, 19 nt, Homo sapiens
  misc_RNA (1)...(19): siRNA sense strand
agagaaugccucagauauu

SEQ ID NO: 2670174 - RNA, 19 nt, Homo sapiens
  misc_RNA (1)...(19): siRNA sense strand
cagccagaccagaggaaga

SEQ ID NO: 2670175 - RNA, 19 nt, Homo sapiens
  misc_RNA (1)...(19): siRNA sense strand
cagagaacuaaaagagaaa

SEQ ID NO: 2670176 - RNA, 19 nt, Homo sapiens
  misc_RNA (1)...(19): siRNA sense strand
agacuuaagcugugcauga

SEQ ID NO: 2670177 - RNA, 19 nt, Homo sapiens
  misc_RNA (1)...(19): siRNA sense strand
gugaaauccugcagagaac

SEQ ID NO: 2670178 - RNA, 19 nt, Homo sapiens
  misc_RNA (1)...(19): siRNA sense strand
ugagaauugccuuaggaua

SEQ ID NO: 2670179 - RNA, 19 nt, Homo sapiens
  misc_RNA (1)...(19): siRNA sense strand
ccuuaggauauuuggagaa

SEQ ID NO: 2670180 - RNA, 19 nt, Homo sapiens
  misc_RNA (1)...(19): siRNA sense strand
cagaccagaggaagagaaa

SEQ ID NO: 2670181 - RNA, 19 nt, Homo sapiens
  misc_RNA (1)...(19): siRNA sense strand
ggcauaagucuuugcaaau

SEQ ID NO: 2670182 - RNA, 19 nt, Homo sapiens
  misc_RNA (1)...(19): siRNA sense strand
agauuaaaccuuugcccaa

SEQ ID NO: 2670183 - RNA, 19 nt, Homo sapiens
  misc_RNA (1)...(19): siRNA sense strand
gaccagaggaagagaaaau

SEQ ID NO: 2670184 - RNA, 19 nt, Homo sapiens
  misc_RNA (1)...(19): siRNA sense strand
aaggaaaugaugaagagaa

SEQ ID NO: 2670185 - RNA, 19 nt, Homo sapiens
  misc_RNA (1)...(19): siRNA sense strand
agagagaaugccucagaua

SEQ ID NO: 2670186 - RNA, 19 nt, Homo sapiens
  misc_RNA (1)...(19): siRNA sense strand
agaugugacacuagagaga

SEQ ID NO: 2670187 - RNA, 19 nt, Homo sapiens
  misc_RNA (1)...(19): siRNA sense strand
augugacacuagagagaau

SEQ ID NO: 2670188 - RNA, 19 nt, Homo sapiens
  misc_RNA (1)...(19): siRNA sense strand
aauccaagccggugaacau

SEQ ID NO: 2670189 - RNA, 19 nt, Homo sapiens
  misc_RNA (1)...(19): siRNA sense strand
ugaagucacaugaggaaau

SEQ ID NO: 2670190 - RNA, 19 nt, Homo sapiens
  misc_RNA (1)...(19): siRNA sense strand
gguucucugccuugggaaa

SEQ ID NO: 2670191 - RNA, 19 nt, Homo sapiens
  misc_RNA (1)...(19): siRNA sense strand
guguggaugaagugggaga

SEQ ID NO: 2670192 - RNA, 19 nt, Homo sapiens
  misc_RNA (1)...(19): siRNA sense strand
gaguagugccacaaaccaa

SEQ ID NO: 2670193 - RNA, 19 nt, Homo sapiens
  misc_RNA (1)...(19): siRNA sense strand
augaagugggagaaggcaa

SEQ ID NO: 2670194 - RNA, 19 nt, Homo sapiens
  misc_RNA (1)...(19): siRNA sense strand
gauuaccaguuguggguca

SEQ ID NO: 2670195 - RNA, 19 nt, Homo sapiens
  misc_RNA (1)...(19): siRNA sense strand
cggccuacuaccagggaca

SEQ ID NO: 2670196 - RNA, 19 nt, Homo sapiens
  misc_RNA (1)...(19): siRNA sense strand
acucaaaacacuaagaaga

SEQ ID NO: 2670197 - RNA, 19 nt, Homo sapiens
  misc_RNA (1)...(19): siRNA sense strand
gcuuggaaaaugagcuaaa

SEQ ID NO: 2670198 - RNA, 19 nt, Homo sapiens
  misc_RNA (1)...(19): siRNA sense strand
aggacuacccgaagagcau

SEQ ID NO: 2670199 - RNA, 19 nt, Homo sapiens
  misc_RNA (1)...(19): siRNA sense strand
gugacuugguaaagaaacu

SEQ ID NO: 2670200 - RNA, 19 nt, Homo sapiens
  misc_RNA (1)...(19): siRNA sense strand
ccaacauagaagaccagaa

SEQ ID NO: 2670201 - RNA, 19 nt, Homo sapiens
  misc_RNA (1)...(19): siRNA sense strand
ugcauggagaggaggauua

SEQ ID NO: 2670202 - RNA, 19 nt, Homo sapiens
  misc_RNA (1)...(19): siRNA sense strand
auacaaagaaggacaccau

SEQ ID NO: 2670203 - RNA, 19 nt, Homo sapiens
  misc_RNA (1)...(19): siRNA sense strand
caucugucuuaaaggauuu

SEQ ID NO: 2670204 - RNA, 19 nt, Homo sapiens
  misc_RNA (1)...(19): siRNA sense strand
aaauacuguucaaaggcua

SEQ ID NO: 2670205 - RNA, 19 nt, Homo sapiens
  misc_RNA (1)...(19): siRNA sense strand
gccuauacaaagaaggaca

SEQ ID NO: 2670206 - RNA, 19 nt, Homo sapiens
  misc_RNA (1)...(19): siRNA sense strand
uagagaaagaaaaggacua

SEQ ID NO: 2670207 - RNA, 19 nt, Homo sapiens
  misc_RNA (1)...(19): siRNA sense strand
aaggaaaucacgugaaacu

SEQ ID NO: 2670208 - RNA, 19 nt, Homo sapiens
  misc_RNA (1)...(19): siRNA sense strand
gcgacauugaggacaggua

SEQ ID NO: 2670209 - RNA, 19 nt, Homo sapiens
  misc_RNA (1)...(19): siRNA sense strand
guuacacaacauugagcaa

SEQ ID NO: 2670210 - RNA, 19 nt, Homo sapiens
  misc_RNA (1)...(19): siRNA sense strand
ccagcacaugguugagaaa

SEQ ID NO: 2670211 - RNA, 19 nt, Homo sapiens
  misc_RNA (1)...(19): siRNA sense strand
aaugaaaacacuagcagaa

SEQ ID NO: 2670212 - RNA, 19 nt, Homo sapiens
  misc_RNA (1)...(19): siRNA sense strand
acucacugcaagaggaaca

SEQ ID NO: 2670213 - RNA, 19 nt, Homo sapiens
  misc_RNA (1)...(19): siRNA sense strand
cagcgaaugaaguuaucaa

SEQ ID NO: 2670214 - RNA, 19 nt, Homo sapiens
  misc_RNA (1)...(19): siRNA sense strand
ccuaugacagcuuggaaaa

SEQ ID NO: 2670215 - RNA, 19 nt, Homo sapiens
  misc_RNA (1)...(19): siRNA sense strand
cuuccaggacucagagaga

SEQ ID NO: 2670216 - RNA, 19 nt, Homo sapiens
  misc_RNA (1)...(19): siRNA sense strand
gcgaaugaaguuaucaaca

SEQ ID NO: 2670217 - RNA, 19 nt, Homo sapiens
  misc_RNA (1)...(19): siRNA sense strand
auuaccaaugcuagggaua

SEQ ID NO: 2670218 - RNA, 19 nt, Homo sapiens
  misc_RNA (1)...(19): siRNA sense strand
cgaaguacaccuagacugu

SEQ ID NO: 2670219 - RNA, 19 nt, Homo sapiens
  misc_RNA (1)...(19): siRNA sense strand
cugauugagaauugccuua

SEQ ID NO: 2670220 - RNA, 19 nt, Homo sapiens
  misc_RNA (1)...(19): siRNA sense strand
ccaggaggaaggaaagaca

SEQ ID NO: 2670221 - RNA, 19 nt, Homo sapiens
  misc_RNA (1)...(19): siRNA sense strand
gggaagaccuuucuccuga

SEQ ID NO: 2670222 - RNA, 19 nt, Homo sapiens
  misc_RNA (1)...(19): siRNA sense strand
aggacagcucuuuggaauu

SEQ ID NO: 2670223 - RNA, 19 nt, Homo sapiens
  misc_RNA (1)...(19): siRNA sense strand
ugugaaauccugcagagaa

SEQ ID NO: 2670224 - RNA, 19 nt, Homo sapiens
  misc_RNA (1)...(19): siRNA sense strand
acaccuagacugugaaucu

SEQ ID NO: 2670225 - RNA, 19 nt, Homo sapiens
  misc_RNA (1)...(19): siRNA sense strand
gucugguagugaaggaaau

SEQ ID NO: 2670226 - RNA, 19 nt, Homo sapiens
  misc_RNA (1)...(19): siRNA sense strand
uagaagaccagaaccgcaa

SEQ ID NO: 2670227 - RNA, 19 nt, Homo sapiens
  misc_RNA (1)...(19): siRNA sense strand
cgacauugaggacagguau

SEQ ID NO: 2670228 - RNA, 19 nt, Homo sapiens
  misc_RNA (1)...(19): siRNA sense strand
gggagaaggcaacaccaau

SEQ ID NO: 2670229 - RNA, 19 nt, Homo sapiens
  misc_RNA (1)...(19): siRNA sense strand
uggauaaagcccuacaaaa

SEQ ID NO: 2670230 - RNA, 19 nt, Homo sapiens
  misc_RNA (1)...(19): siRNA sense strand
ggcccauucuaaagaugaa

SEQ ID NO: 2670231 - RNA, 19 nt, Homo sapiens
  misc_RNA (1)...(19): siRNA sense strand
gguauuuaaccaaagacau

SEQ ID NO: 2670232 - RNA, 19 nt, Homo sapiens
  misc_RNA (1)...(19): siRNA sense strand
ugauucaggucauaagaca

SEQ ID NO: 2670233 - RNA, 19 nt, Homo sapiens
  misc_RNA (1)...(19): siRNA sense strand
cgugugaggcagaggacuu

SEQ ID NO: 2670234 - RNA, 19 nt, Homo sapiens
  misc_RNA (1)...(19): siRNA sense strand
gcgcaucgugugaggcaga

SEQ ID NO: 2670235 - RNA, 19 nt, Homo sapiens
  misc_RNA (1)...(19): siRNA sense strand
agggaaacaaacugugaca

SEQ ID NO: 2670236 - RNA, 19 nt, Homo sapiens
  misc_RNA (1)...(19): siRNA sense strand
gugacaucugcuauaguua

SEQ ID NO: 2670237 - RNA, 19 nt, Homo sapiens
  misc_RNA (1)...(19): siRNA sense strand
agauagagaaagagaagaa

SEQ ID NO: 2670238 - RNA, 19 nt, Homo sapiens
  misc_RNA (1)...(19): siRNA sense strand
agaagagaggugugggaaa

SEQ ID NO: 2670239 - RNA, 19 nt, Homo sapiens
  misc_RNA (1)...(19): siRNA sense strand
acaaagaagaagauagaga

SEQ ID NO: 2670240 - RNA, 19 nt, Homo sapiens
  misc_RNA (1)...(19): siRNA sense strand
ggagaaaacuugauagcca

SEQ ID NO: 2670241 - RNA, 19 nt, Homo sapiens
  misc_RNA (1)...(19): siRNA sense strand
gagaaagagaagaaggagu

SEQ ID NO: 2670242 - RNA, 19 nt, Homo sapiens
  misc_RNA (1)...(19): siRNA sense strand
gguacugaaacuagaagaa

SEQ ID NO: 2670243 - RNA, 19 nt, Homo sapiens
  misc_RNA (1)...(19): siRNA sense strand
acaauaaagcgggaagaaa

SEQ ID NO: 2670244 - RNA, 19 nt, Homo sapiens
  misc_RNA (1)...(19): siRNA sense strand
caggagauauuaaaggcua

SEQ ID NO: 2670245 - RNA, 19 nt, Homo sapiens
  misc_RNA (1)...(19): siRNA sense strand
cugaauggaguucggauaa

SEQ ID NO: 2670246 - RNA, 19 nt, Homo sapiens
  misc_RNA (1)...(19): siRNA sense strand
uguaaguagccaaacaaua

SEQ ID NO: 2670247 - RNA, 19 nt, Homo sapiens
  misc_RNA (1)...(19): siRNA sense strand
gauaaaaugaugacagaga

SEQ ID NO: 2670248 - RNA, 19 nt, Homo sapiens
  misc_RNA (1)...(19): siRNA sense strand
aaaggagagaagaggaaau

SEQ ID NO: 2670249 - RNA, 19 nt, Homo sapiens
  misc_RNA (1)...(19): siRNA sense strand
acugaauggaguucggaua

SEQ ID NO: 2670250 - RNA, 19 nt, Homo sapiens
  misc_RNA (1)...(19): siRNA sense strand
aggagauauuaaaggcuau

SEQ ID NO: 2670251 - RNA, 19 nt, Homo sapiens
  misc_RNA (1)...(19): siRNA sense strand
ggaucugaaagcugaaauu

SEQ ID NO: 2670252 - RNA, 19 nt, Homo sapiens
  misc_RNA (1)...(19): siRNA sense strand
gaacauuauggaagagacu

SEQ ID NO: 2670253 - RNA, 19 nt, Homo sapiens
  misc_RNA (1)...(19): siRNA sense strand
gggaaauggaacuggauag

SEQ ID NO: 2670254 - RNA, 19 nt, Homo sapiens
  misc_RNA (1)...(19): siRNA sense strand
ggcgaaauaaauaggaaca

SEQ ID NO: 2670255 - RNA, 19 nt, Homo sapiens
  misc_RNA (1)...(19): siRNA sense strand
ccuggaaggcagagaucuu

SEQ ID NO: 2670256 - RNA, 19 nt, Homo sapiens
  misc_RNA (1)...(19): siRNA sense strand
agagguaaacacagaucaa

SEQ ID NO: 2670257 - RNA, 19 nt, Homo sapiens
  misc_RNA (1)...(19): siRNA sense strand
agaagauagagaaagagaa

SEQ ID NO: 2670258 - RNA, 19 nt, Homo sapiens
  misc_RNA (1)...(19): siRNA sense strand
agguaaacacagaucaaga

SEQ ID NO: 2670259 - RNA, 19 nt, Homo sapiens
  misc_RNA (1)...(19): siRNA sense strand
cgggaagaaacaaagaaga

SEQ ID NO: 2670260 - RNA, 19 nt, Homo sapiens
  misc_RNA (1)...(19): siRNA sense strand
gcagaagagagguguggga

SEQ ID NO: 2670261 - RNA, 19 nt, Homo sapiens
  misc_RNA (1)...(19): siRNA sense strand
ccggaaucuucuaguuuau

SEQ ID NO: 2670262 - RNA, 19 nt, Homo sapiens
  misc_RNA (1)...(19): siRNA sense strand
aauaaagcgggaagaaaca

SEQ ID NO: 2670263 - RNA, 19 nt, Homo sapiens
  misc_RNA (1)...(19): siRNA sense strand
aagaagauagagaaagaga

SEQ ID NO: 2670264 - RNA, 19 nt, Homo sapiens
  misc_RNA (1)...(19): siRNA sense strand
auauccaguuagugaggaa

SEQ ID NO: 2670265 - RNA, 19 nt, Homo sapiens
  misc_RNA (1)...(19): siRNA sense strand
caaacaauaaccaaggaga

SEQ ID NO: 2670266 - RNA, 19 nt, Homo sapiens
  misc_RNA (1)...(19): siRNA sense strand
ugaaggaguccgaguggau

SEQ ID NO: 2670267 - RNA, 19 nt, Homo sapiens
  misc_RNA (1)...(19): siRNA sense strand
ugaagaaucaccaggagau

SEQ ID NO: 2670268 - RNA, 19 nt, Homo sapiens
  misc_RNA (1)...(19): siRNA sense strand
auuaaaggcuauucaggau

SEQ ID NO: 2670269 - RNA, 19 nt, Homo sapiens
  misc_RNA (1)...(19): siRNA sense strand
gguuaugcccagugcagau

SEQ ID NO: 2670270 - RNA, 19 nt, Homo sapiens
  misc_RNA (1)...(19): siRNA sense strand
gacacaagccuucgggaga

SEQ ID NO: 2670271 - RNA, 19 nt, Homo sapiens
  misc_RNA (1)...(19): siRNA sense strand
agaaucaccaggagauauu

SEQ ID NO: 2670272 - RNA, 19 nt, Homo sapiens
  misc_RNA (1)...(19): siRNA sense strand
acaauaaccaaggagaaua

SEQ ID NO: 2670273 - RNA, 19 nt, Homo sapiens
  misc_RNA (1)...(19): siRNA sense strand
aaggaagguaacagggaca

SEQ ID NO: 2670274 - RNA, 19 nt, Homo sapiens
  misc_RNA (1)...(19): siRNA sense strand
auucaggaugugacaauaa

SEQ ID NO: 2670275 - RNA, 19 nt, Homo sapiens
  misc_RNA (1)...(19): siRNA sense strand
uagagaaagagaagaagga

SEQ ID NO: 2670276 - RNA, 19 nt, Homo sapiens
  misc_RNA (1)...(19): siRNA sense strand
acauuauggaagagacuga

SEQ ID NO: 2670277 - RNA, 19 nt, Homo sapiens
  misc_RNA (1)...(19): siRNA sense strand
gaaucagcuccaagugcaa

SEQ ID NO: 2670278 - RNA, 19 nt, Homo sapiens
  misc_RNA (1)...(19): siRNA sense strand
guacccauguauugcacaa

SEQ ID NO: 2670279 - RNA, 19 nt, Homo sapiens
  misc_RNA (1)...(19): siRNA sense strand
auugagaagcuuugugaga

SEQ ID NO: 2670280 - RNA, 19 nt, Homo sapiens
  misc_RNA (1)...(19): siRNA sense strand
gcugaaauugagaagcuuu

SEQ ID NO: 2670281 - RNA, 19 nt, Homo sapiens
  misc_RNA (1)...(19): siRNA sense strand
ugagaagcuuugugagaag

SEQ ID NO: 2670282 - RNA, 19 nt, Homo sapiens
  misc_RNA (1)...(19): siRNA sense strand
agagagccggaaagaguua

SEQ ID NO: 2670283 - RNA, 19 nt, Homo sapiens
  misc_RNA (1)...(19): siRNA sense strand
gagugggagacgagacuga

SEQ ID NO: 2670284 - RNA, 19 nt, Homo sapiens
  misc_RNA (1)...(19): siRNA sense strand
gggcccagaccaacacaaa

SEQ ID NO: 2670285 - RNA, 19 nt, Homo sapiens
  misc_RNA (1)...(19): siRNA sense strand
agacgaagcugaagggagu

SEQ ID NO: 2670286 - RNA, 19 nt, Homo sapiens
  misc_RNA (1)...(19): siRNA sense strand
ggucaagaugcgggagaaa

SEQ ID NO: 2670287 - RNA, 19 nt, Homo sapiens
  misc_RNA (1)...(19): siRNA sense strand
aggagaagcugguggccuu

SEQ ID NO: 2670288 - RNA, 19 nt, Homo sapiens
  misc_RNA (1)...(19): siRNA sense strand
uggacaagcaugagacgaa

SEQ ID NO: 2670289 - RNA, 19 nt, Homo sapiens
  misc_RNA (1)...(19): siRNA sense strand
gaggaagggaggacgguga

SEQ ID NO: 2670290 - RNA, 19 nt, Homo sapiens
  misc_RNA (1)...(19): siRNA sense strand
ugaaggagcuagagcagca

SEQ ID NO: 2670291 - RNA, 19 nt, Homo sapiens
  misc_RNA (1)...(19): siRNA sense strand
cccuggagacugagacaaa

SEQ ID NO: 2670292 - RNA, 19 nt, Homo sapiens
  misc_RNA (1)...(19): siRNA sense strand
ugaaagugcaaacggacaa

SEQ ID NO: 2670293 - RNA, 19 nt, Homo sapiens
  misc_RNA (1)...(19): siRNA sense strand
agaucgaggagauggagaa

SEQ ID NO: 2670294 - RNA, 19 nt, Homo sapiens
  misc_RNA (1)...(19): siRNA sense strand
ucacaggggcugagggcua

SEQ ID NO: 2670295 - RNA, 19 nt, Homo sapiens
  misc_RNA (1)...(19): siRNA sense strand
gcaaagggcugaaagugca

SEQ ID NO: 2670296 - RNA, 19 nt, Homo sapiens
  misc_RNA (1)...(19): siRNA sense strand
ugaaagaggcucaugcaga

SEQ ID NO: 2670297 - RNA, 19 nt, Homo sapiens
  misc_RNA (1)...(19): siRNA sense strand
gcagcaucgccaagaggaa

SEQ ID NO: 2670298 - RNA, 19 nt, Homo sapiens
  misc_RNA (1)...(19): siRNA sense strand
cugcaaaaggagaaggaga

SEQ ID NO: 2670299 - RNA, 19 nt, Homo sapiens
  misc_RNA (1)...(19): siRNA sense strand
agggagagagggaggcaga

SEQ ID NO: 2670300 - RNA, 19 nt, Homo sapiens
  misc_RNA (1)...(19): siRNA sense strand
agcagaaggcaguggauca

SEQ ID NO: 2670301 - RNA, 19 nt, Homo sapiens
  misc_RNA (1)...(19): siRNA sense strand
uggucgagaaggaggucaa

SEQ ID NO: 2670302 - RNA, 19 nt, Homo sapiens
  misc_RNA (1)...(19): siRNA sense strand
gggcuucaccagaggacuu

SEQ ID NO: 2670303 - RNA, 19 nt, Homo sapiens
  misc_RNA (1)...(19): siRNA sense strand
ggaagaucgaggagaugga

SEQ ID NO: 2670304 - RNA, 19 nt, Homo sapiens
  misc_RNA (1)...(19): siRNA sense strand
cugcagaaucagaaagucu

SEQ ID NO: 2670305 - RNA, 19 nt, Homo sapiens
  misc_RNA (1)...(19): siRNA sense strand
ugcaaaaggagaaggagaa

SEQ ID NO: 2670306 - RNA, 19 nt, Homo sapiens
  misc_RNA (1)...(19): siRNA sense strand
aggcucaugcagagaagaa

SEQ ID NO: 2670307 - RNA, 19 nt, Homo sapiens
  misc_RNA (1)...(19): siRNA sense strand
auccagaaggagagggaca

SEQ ID NO: 2670308 - RNA, 19 nt, Homo sapiens
  misc_RNA (1)...(19): siRNA sense strand
ccaaauaggcccuggaugc

SEQ ID NO: 2670309 - RNA, 19 nt, Homo sapiens
  misc_RNA (1)...(19): siRNA sense strand
gcagagaagaaccggcuca

SEQ ID NO: 2670310 - RNA, 19 nt, Homo sapiens
  misc_RNA (1)...(19): siRNA sense strand
cugaaagugcaaacggaca

SEQ ID NO: 2670311 - RNA, 19 nt, Homo sapiens
  misc_RNA (1)...(19): siRNA sense strand
gggaaguggcagagagucc

SEQ ID NO: 2670312 - RNA, 19 nt, Homo sapiens
  misc_RNA (1)...(19): siRNA sense strand
cccucaaagagauggagaa

SEQ ID NO: 2670313 - RNA, 19 nt, Homo sapiens
  misc_RNA (1)...(19): siRNA sense strand
acuuugaccugaagacaca

SEQ ID NO: 2670314 - RNA, 19 nt, Homo sapiens
  misc_RNA (1)...(19): siRNA sense strand
cagccacacugcaggacau

SEQ ID NO: 2670315 - RNA, 19 nt, Homo sapiens
  misc_RNA (1)...(19): siRNA sense strand
ugcaggacaucgagaccaa

SEQ ID NO: 2670316 - RNA, 19 nt, Homo sapiens
  misc_RNA (1)...(19): siRNA sense strand
gcucucaauaggaaccaaa

SEQ ID NO: 2670317 - RNA, 19 nt, Homo sapiens
  misc_RNA (1)...(19): siRNA sense strand
ucucaauaggaaccaaaua

SEQ ID NO: 2670318 - RNA, 19 nt, Homo sapiens
  misc_RNA (1)...(19): siRNA sense strand
uaaacagggaaguggcaga

SEQ ID NO: 2670319 - RNA, 19 nt, Homo sapiens
  misc_RNA (1)...(19): siRNA sense strand
gcagcagaagggacaacaa

SEQ ID NO: 2670320 - RNA, 19 nt, Homo sapiens
  misc_RNA (1)...(19): siRNA sense strand
agggacaacaagugauuga

SEQ ID NO: 2670321 - RNA, 19 nt, Homo sapiens
  misc_RNA (1)...(19): siRNA sense strand
aagcaugagacgaagcuga

SEQ ID NO: 2670322 - RNA, 19 nt, Homo sapiens
  misc_RNA (1)...(19): siRNA sense strand
uugagaaggaccugcaaga

SEQ ID NO: 2670323 - RNA, 19 nt, Homo sapiens
  misc_RNA (1)...(19): siRNA sense strand
ccacugucaccgauggcua

SEQ ID NO: 2670324 - RNA, 19 nt, Homo sapiens
  misc_RNA (1)...(19): siRNA sense strand
agaaggagcagaaggcagu

SEQ ID NO: 2670325 - RNA, 19 nt, Homo sapiens
  misc_RNA (1)...(19): siRNA sense strand
gcauccagaaggagaggga

SEQ ID NO: 2670326 - RNA, 19 nt, Homo sapiens
  misc_RNA (1)...(19): siRNA sense strand
aggucaagaugcgggagaa

SEQ ID NO: 2670327 - RNA, 19 nt, Homo sapiens
  misc_RNA (1)...(19): siRNA sense strand
cagcaguuggagcgggaga

SEQ ID NO: 2670328 - RNA, 19 nt, Homo sapiens
  misc_RNA (1)...(19): siRNA sense strand
ccgaaacaagauuggcaca

SEQ ID NO: 2670329 - RNA, 19 nt, Homo sapiens
  misc_RNA (1)...(19): siRNA sense strand
ucgagaaggaggucaagau

SEQ ID NO: 2670330 - RNA, 19 nt, Homo sapiens
  misc_RNA (1)...(19): siRNA sense strand
uggggaagaucgaggagau

SEQ ID NO: 2670331 - RNA, 19 nt, Homo sapiens
  misc_RNA (1)...(19): siRNA sense strand
gcauguugugccuggguca

SEQ ID NO: 2670332 - RNA, 19 nt, Homo sapiens
  misc_RNA (1)...(19): siRNA sense strand
aggaggacuuugaccugaa

SEQ ID NO: 2670333 - RNA, 19 nt, Homo sapiens
  misc_RNA (1)...(19): siRNA sense strand
cagaagaggaggaggcuga

SEQ ID NO: 2670334 - RNA, 19 nt, Homo sapiens
  misc_RNA (1)...(19): siRNA sense strand
aggcugaggaccaggaaga

SEQ ID NO: 2670335 - RNA, 19 nt, Homo sapiens
  misc_RNA (1)...(19): siRNA sense strand
aggaggaggcugaggacca

SEQ ID NO: 2670336 - RNA, 19 nt, Homo sapiens
  misc_RNA (1)...(19): siRNA sense strand
cuggaaagcuggaggucuc

SEQ ID NO: 2670337 - RNA, 19 nt, Homo sapiens
  misc_RNA (1)...(19): siRNA sense strand
ggaagaauacuguccguca

SEQ ID NO: 2670338 - RNA, 19 nt, Homo sapiens
  misc_RNA (1)...(19): siRNA sense strand
ggacguaggaagagggagg

SEQ ID NO: 2670339 - RNA, 19 nt, Homo sapiens
  misc_RNA (1)...(19): siRNA sense strand
cagaagaggaggaggcuga

SEQ ID NO: 2670340 - RNA, 19 nt, Homo sapiens
  misc_RNA (1)...(19): siRNA sense strand
aggcugaggaccaggaaga

SEQ ID NO: 2670341 - RNA, 19 nt, Homo sapiens
  misc_RNA (1)...(19): siRNA sense strand
aggaggaggcugaggacca

SEQ ID NO: 2670342 - RNA, 19 nt, Homo sapiens
  misc_RNA (1)...(19): siRNA sense strand
cuggaaagcuggaggucuc

SEQ ID NO: 2670343 - RNA, 19 nt, Homo sapiens
  misc_RNA (1)...(19): siRNA sense strand
ggaagaauacuguccguca

SEQ ID NO: 2670344 - RNA, 19 nt, Homo sapiens
  misc_RNA (1)...(19): siRNA sense strand
ggacguaggaagagggagg

SEQ ID NO: 2670345 - RNA, 19 nt, Homo sapiens
  misc_RNA (1)...(19): siRNA sense strand
gcauagagaccaagccaga

SEQ ID NO: 2670346 - RNA, 19 nt, Homo sapiens
  misc_RNA (1)...(19): siRNA sense strand
uggaagagaaugaagugaa

SEQ ID NO: 2670347 - RNA, 19 nt, Homo sapiens
  misc_RNA (1)...(19): siRNA sense strand
ccagugaugacgaggacua

SEQ ID NO: 2670348 - RNA, 19 nt, Homo sapiens
  misc_RNA (1)...(19): siRNA sense strand
acuucaacacaaugggaua

SEQ ID NO: 2670349 - RNA, 19 nt, Homo sapiens
  misc_RNA (1)...(19): siRNA sense strand
gcugagaugcacagacaau

SEQ ID NO: 2670350 - RNA, 19 nt, Homo sapiens
  misc_RNA (1)...(19): siRNA sense strand
aagagaaugaagugaauga

SEQ ID NO: 2670351 - RNA, 19 nt, Homo sapiens
  misc_RNA (1)...(19): siRNA sense strand
aaaccagagccgagugauu

SEQ ID NO: 2670352 - RNA, 19 nt, Homo sapiens
  misc_RNA (1)...(19): siRNA sense strand
cagaugaggaugugggcca

SEQ ID NO: 2670353 - RNA, 19 nt, Homo sapiens
  misc_RNA (1)...(19): siRNA sense strand
gugaauguuacgugauaga

SEQ ID NO: 2670354 - RNA, 19 nt, Homo sapiens
  misc_RNA (1)...(19): siRNA sense strand
acacacacgaugaaggaga

SEQ ID NO: 2670355 - RNA, 19 nt, Homo sapiens
  misc_RNA (1)...(19): siRNA sense strand
aggcgagccaggagaguga

SEQ ID NO: 2670356 - RNA, 19 nt, Homo sapiens
  misc_RNA (1)...(19): siRNA sense strand
cgucggaaagugaagaaaa

SEQ ID NO: 2670357 - RNA, 19 nt, Homo sapiens
  misc_RNA (1)...(19): siRNA sense strand
agagcagcauagagaccaa

SEQ ID NO: 2670358 - RNA, 19 nt, Homo sapiens
  misc_RNA (1)...(19): siRNA sense strand
aagagaucccuguggaaga

SEQ ID NO: 2670359 - RNA, 19 nt, Homo sapiens
  misc_RNA (1)...(19): siRNA sense strand
ucaaugacaaugaggacau

SEQ ID NO: 2670360 - RNA, 19 nt, Homo sapiens
  misc_RNA (1)...(19): siRNA sense strand
aaaaggaggagaauggaaa

SEQ ID NO: 2670361 - RNA, 19 nt, Homo sapiens
  misc_RNA (1)...(19): siRNA sense strand
cagaaugggcccagcucuu

SEQ ID NO: 2670362 - RNA, 19 nt, Homo sapiens
  misc_RNA (1)...(19): siRNA sense strand
gcaagaauuccaagucuca

SEQ ID NO: 2670363 - RNA, 19 nt, Homo sapiens
  misc_RNA (1)...(19): siRNA sense strand
cuacaagcagagaaaugaa

SEQ ID NO: 2670364 - RNA, 19 nt, Homo sapiens
  misc_RNA (1)...(19): siRNA sense strand
gagagugaauguuacguga

SEQ ID NO: 2670365 - RNA, 19 nt, Homo sapiens
  misc_RNA (1)...(19): siRNA sense strand
aacucuggauguuggaaua

SEQ ID NO: 2670366 - RNA, 19 nt, Homo sapiens
  misc_RNA (1)...(19): siRNA sense strand
ugaagagaucccuguggaa

SEQ ID NO: 2670367 - RNA, 19 nt, Homo sapiens
  misc_RNA (1)...(19): siRNA sense strand
cggcauaucccggaggaca

SEQ ID NO: 2670368 - RNA, 19 nt, Homo sapiens
  misc_RNA (1)...(19): siRNA sense strand
gagacgggucccuggaaaa

SEQ ID NO: 2670369 - RNA, 19 nt, Homo sapiens
  misc_RNA (1)...(19): siRNA sense strand
cgcagaaccaggacggaga

SEQ ID NO: 2670370 - RNA, 19 nt, Homo sapiens
  misc_RNA (1)...(19): siRNA sense strand
cggcaagaauuccaagucu

SEQ ID NO: 2670371 - RNA, 19 nt, Homo sapiens
  misc_RNA (1)...(19): siRNA sense strand
gggucuaaggcuccaagaa

SEQ ID NO: 2670372 - RNA, 19 nt, Homo sapiens
  misc_RNA (1)...(19): siRNA sense strand
ggagaagggcucagaucac

SEQ ID NO: 2670373 - RNA, 19 nt, Homo sapiens
  misc_RNA (1)...(19): siRNA sense strand
acacuaacauccacaggga

SEQ ID NO: 2670374 - RNA, 19 nt, Homo sapiens
  misc_RNA (1)...(19): siRNA sense strand
cggaacaagagccgacuca

SEQ ID NO: 2670375 - RNA, 19 nt, Homo sapiens
  misc_RNA (1)...(19): siRNA sense strand
acaagagccugaagggcaa

SEQ ID NO: 2670376 - RNA, 19 nt, Homo sapiens
  misc_RNA (1)...(19): siRNA sense strand
ccugaagggcaacgccaaa

SEQ ID NO: 2670377 - RNA, 19 nt, Homo sapiens
  misc_RNA (1)...(19): siRNA sense strand
gcgaagagccugcugccau

SEQ ID NO: 2670378 - RNA, 19 nt, Homo sapiens
  misc_RNA (1)...(19): siRNA sense strand
cgguuaguauacaaagaga

SEQ ID NO: 2670379 - RNA, 19 nt, Homo sapiens
  misc_RNA (1)...(19): siRNA sense strand
cacaagagccugaagggca

SEQ ID NO: 2670380 - RNA, 19 nt, Homo sapiens
  misc_RNA (1)...(19): siRNA sense strand
gccuugagacuguggccaa

SEQ ID NO: 2670381 - RNA, 19 nt, Homo sapiens
  misc_RNA (1)...(19): siRNA sense strand
gguuaguauacaaagagau

SEQ ID NO: 2670382 - RNA, 19 nt, Homo sapiens
  misc_RNA (1)...(19): siRNA sense strand
cugggauauuucuggaaca

SEQ ID NO: 2670383 - RNA, 19 nt, Homo sapiens
  misc_RNA (1)...(19): siRNA sense strand
ccuugagacuguggccaaa

SEQ ID NO: 2670384 - RNA, 19 nt, Homo sapiens
  misc_RNA (1)...(19): siRNA sense strand
gguccuaacccaccaguga

SEQ ID NO: 2670385 - RNA, 19 nt, Homo sapiens
  misc_RNA (1)...(19): siRNA sense strand
ggaagaaggacuuugggau

SEQ ID NO: 2670386 - RNA, 19 nt, Homo sapiens
  misc_RNA (1)...(19): siRNA sense strand
ugggaauuaccaagaauaa

SEQ ID NO: 2670387 - RNA, 19 nt, Homo sapiens
  misc_RNA (1)...(19): siRNA sense strand
gcggcgaggaauugggaau

SEQ ID NO: 2670388 - RNA, 19 nt, Homo sapiens
  misc_RNA (1)...(19): siRNA sense strand
gggaauuaccaagaauaaa

SEQ ID NO: 2670389 - RNA, 19 nt, Homo sapiens
  misc_RNA (1)...(19): siRNA sense strand
accaagaauaaaugggaau

SEQ ID NO: 2670390 - RNA, 19 nt, Homo sapiens
  misc_RNA (1)...(19): siRNA sense strand
gaagaaggacuuugggaug

SEQ ID NO: 2670391 - RNA, 19 nt, Homo sapiens
  misc_RNA (1)...(19): siRNA sense strand
cagaaguggaaguuaagau

SEQ ID NO: 2670392 - RNA, 19 nt, Homo sapiens
  misc_RNA (1)...(19): siRNA sense strand
aagaaggacuuugggauga

SEQ ID NO: 2670393 - RNA, 19 nt, Homo sapiens
  misc_RNA (1)...(19): siRNA sense strand
gcugguaccugucuaggaa

SEQ ID NO: 2670394 - RNA, 19 nt, Homo sapiens
  misc_RNA (1)...(19): siRNA sense strand
uaccaagaauaaaugggaa

SEQ ID NO: 2670395 - RNA, 19 nt, Homo sapiens
  misc_RNA (1)...(19): siRNA sense strand
agaaggacuuugggaugaa

SEQ ID NO: 2670396 - RNA, 19 nt, Homo sapiens
  misc_RNA (1)...(19): siRNA sense strand
cagagaagaugcugaggca

SEQ ID NO: 2670397 - RNA, 19 nt, Homo sapiens
  misc_RNA (1)...(19): siRNA sense strand
agguuuggauccugcacaa

SEQ ID NO: 2670398 - RNA, 19 nt, Homo sapiens
  misc_RNA (1)...(19): siRNA sense strand
ggaaauaccaggugaguga

SEQ ID NO: 2670399 - RNA, 19 nt, Homo sapiens
  misc_RNA (1)...(19): siRNA sense strand
ccucggugcuagugggaaa

SEQ ID NO: 2670400 - RNA, 19 nt, Homo sapiens
  misc_RNA (1)...(19): siRNA sense strand
gggaagcugcagagagaca

SEQ ID NO: 2670401 - RNA, 19 nt, Homo sapiens
  misc_RNA (1)...(19): siRNA sense strand
gguacuggcaggacgagaa

SEQ ID NO: 2670402 - RNA, 19 nt, Homo sapiens
  misc_RNA (1)...(19): siRNA sense strand
agcguaagcucaagcgcaa

SEQ ID NO: 2670403 - RNA, 19 nt, Homo sapiens
  misc_RNA (1)...(19): siRNA sense strand
agaaguacagcguggccaa

SEQ ID NO: 2670404 - RNA, 19 nt, Homo sapiens
  misc_RNA (1)...(19): siRNA sense strand
gcuuggacguguuuggaca

SEQ ID NO: 2670405 - RNA, 19 nt, Homo sapiens
  misc_RNA (1)...(19): siRNA sense strand
ccucauagccaaucggacu

SEQ ID NO: 2670406 - RNA, 19 nt, Homo sapiens
  misc_RNA (1)...(19): siRNA sense strand
aaggagaguucuuugccaa

SEQ ID NO: 2670407 - RNA, 19 nt, Homo sapiens
  misc_RNA (1)...(19): siRNA sense strand
ccgagagucugcagcccaa

SEQ ID NO: 2670408 - RNA, 19 nt, Homo sapiens
  misc_RNA (1)...(19): siRNA sense strand
gugaugugcccgagagucu

SEQ ID NO: 2670409 - RNA, 19 nt, Homo sapiens
  misc_RNA (1)...(19): siRNA sense strand
ccaccauccccgaggagaa

SEQ ID NO: 2670410 - RNA, 19 nt, Homo sapiens
  misc_RNA (1)...(19): siRNA sense strand
agucggacgaggagaacga

SEQ ID NO: 2670411 - RNA, 19 nt, Homo sapiens
  misc_RNA (1)...(19): siRNA sense strand
aagccaaggcaugggcaua

SEQ ID NO: 2670412 - RNA, 19 nt, Homo sapiens
  misc_RNA (1)...(19): siRNA sense strand
ccaucagcagcaagaagua

SEQ ID NO: 2670413 - RNA, 19 nt, Homo sapiens
  misc_RNA (1)...(19): siRNA sense strand
gccagucggacgaggagaa

SEQ ID NO: 2670414 - RNA, 19 nt, Homo sapiens
  misc_RNA (1)...(19): siRNA sense strand
cugaaagagagguggauaa

SEQ ID NO: 2670415 - RNA, 19 nt, Homo sapiens
  misc_RNA (1)...(19): siRNA sense strand
ggagaauggaacagggaau

SEQ ID NO: 2670416 - RNA, 19 nt, Homo sapiens
  misc_RNA (1)...(19): siRNA sense strand
gcauagaagcagagaucau

SEQ ID NO: 2670417 - RNA, 19 nt, Homo sapiens
  misc_RNA (1)...(19): siRNA sense strand
cagcagaggagcaggaauu

SEQ ID NO: 2670418 - RNA, 19 nt, Homo sapiens
  misc_RNA (1)...(19): siRNA sense strand
gaacauggaucuauggaga

SEQ ID NO: 2670419 - RNA, 19 nt, Homo sapiens
  misc_RNA (1)...(19): siRNA sense strand
ccuaagagcucucaggcua

SEQ ID NO: 2670420 - RNA, 19 nt, Homo sapiens
  misc_RNA (1)...(19): siRNA sense strand
acgaagaccuguuggugaa

SEQ ID NO: 2670421 - RNA, 19 nt, Homo sapiens
  misc_RNA (1)...(19): siRNA sense strand
agaacaagaagaugagaau

SEQ ID NO: 2670422 - RNA, 19 nt, Homo sapiens
  misc_RNA (1)...(19): siRNA sense strand
augagaagcaugagaagua

SEQ ID NO: 2670423 - RNA, 19 nt, Homo sapiens
  misc_RNA (1)...(19): siRNA sense strand
gguagauaaaucagaguau

SEQ ID NO: 2670424 - RNA, 19 nt, Homo sapiens
  misc_RNA (1)...(19): siRNA sense strand
aguuggaucuggagaaaga

SEQ ID NO: 2670425 - RNA, 19 nt, Homo sapiens
  misc_RNA (1)...(19): siRNA sense strand
aauacaaucuugggagaaa

SEQ ID NO: 2670426 - RNA, 19 nt, Homo sapiens
  misc_RNA (1)...(19): siRNA sense strand
ccuaagagcacccgggaca

SEQ ID NO: 2670427 - RNA, 19 nt, Homo sapiens
  misc_RNA (1)...(19): siRNA sense strand
ugaagaaguaccaggaaca

SEQ ID NO: 2670428 - RNA, 19 nt, Homo sapiens
  misc_RNA (1)...(19): siRNA sense strand
uagaagaacaagaagauga

SEQ ID NO: 2670429 - RNA, 19 nt, Homo sapiens
  misc_RNA (1)...(19): siRNA sense strand
agauugagcacgugaccaa

SEQ ID NO: 2670430 - RNA, 19 nt, Homo sapiens
  misc_RNA (1)...(19): siRNA sense strand
guucauaagaagaauguca

SEQ ID NO: 2670431 - RNA, 19 nt, Homo sapiens
  misc_RNA (1)...(19): siRNA sense strand
aggccggagucaaggaaau

SEQ ID NO: 2670432 - RNA, 19 nt, Homo sapiens
  misc_RNA (1)...(19): siRNA sense strand
cagcauagaagcagagauc

SEQ ID NO: 2670433 - RNA, 19 nt, Homo sapiens
  misc_RNA (1)...(19): siRNA sense strand
uguacaguaucgagaauau

SEQ ID NO: 2670434 - RNA, 19 nt, Homo sapiens
  misc_RNA (1)...(19): siRNA sense strand
gagaaggagauaaggucau

SEQ ID NO: 2670435 - RNA, 19 nt, Homo sapiens
  misc_RNA (1)...(19): siRNA sense strand
gggaauacgcuauguucau

SEQ ID NO: 2670436 - RNA, 19 nt, Homo sapiens
  misc_RNA (1)...(19): siRNA sense strand
ggaaagucaaacaaagaga

SEQ ID NO: 2670437 - RNA, 19 nt, Homo sapiens
  misc_RNA (1)...(19): siRNA sense strand
ucacagaugaacagcgauu

SEQ ID NO: 2670438 - RNA, 19 nt, Homo sapiens
  misc_RNA (1)...(19): siRNA sense strand
guggaugaauuaaaggaga

SEQ ID NO: 2670439 - RNA, 19 nt, Homo sapiens
  misc_RNA (1)...(19): siRNA sense strand
agggaaagucaaacaaaga

SEQ ID NO: 2670440 - RNA, 19 nt, Homo sapiens
  misc_RNA (1)...(19): siRNA sense strand
cgaaagaccccucugaaaa

SEQ ID NO: 2670441 - RNA, 19 nt, Homo sapiens
  misc_RNA (1)...(19): siRNA sense strand
ggagaaggagauaagguca

SEQ ID NO: 2670442 - RNA, 19 nt, Homo sapiens
  misc_RNA (1)...(19): siRNA sense strand
aagaacaagaagaugagaa

SEQ ID NO: 2670443 - RNA, 19 nt, Homo sapiens
  misc_RNA (1)...(19): siRNA sense strand
aggagaaggcccuggaguu

SEQ ID NO: 2670444 - RNA, 19 nt, Homo sapiens
  misc_RNA (1)...(19): siRNA sense strand
gcuuacagcacgaggaucu

SEQ ID NO: 2670445 - RNA, 19 nt, Homo sapiens
  misc_RNA (1)...(19): siRNA sense strand
gcuuaggagugcugccuuu

SEQ ID NO: 2670446 - RNA, 19 nt, Homo sapiens
  misc_RNA (1)...(19): siRNA sense strand
agccagagcucuuaaccaa

SEQ ID NO: 2670447 - RNA, 19 nt, Homo sapiens
  misc_RNA (1)...(19): siRNA sense strand
gaacagggaauauggacga

SEQ ID NO: 2670448 - RNA, 19 nt, Homo sapiens
  misc_RNA (1)...(19): siRNA sense strand
ucaaacaaagagagacgaa

SEQ ID NO: 2670449 - RNA, 19 nt, Homo sapiens
  misc_RNA (1)...(19): siRNA sense strand
agaucaagcuuuuggcaau

SEQ ID NO: 2670450 - RNA, 19 nt, Homo sapiens
  misc_RNA (1)...(19): siRNA sense strand
ggaaaagaaagaaagaaca

SEQ ID NO: 2670451 - RNA, 19 nt, Homo sapiens
  misc_RNA (1)...(19): siRNA sense strand
ugccaaggugguagauaaa

SEQ ID NO: 2670452 - RNA, 19 nt, Homo sapiens
  misc_RNA (1)...(19): siRNA sense strand
ucucaggcaugaaggaaga

SEQ ID NO: 2670453 - RNA, 19 nt, Homo sapiens
  misc_RNA (1)...(19): siRNA sense strand
augacauggccuuggcaaa

SEQ ID NO: 2670454 - RNA, 19 nt, Homo sapiens
  misc_RNA (1)...(19): siRNA sense strand
gaguaugacaugaagaagu

SEQ ID NO: 2670455 - RNA, 19 nt, Homo sapiens
  misc_RNA (1)...(19): siRNA sense strand
ggagagaagauauugagau

SEQ ID NO: 2670456 - RNA, 19 nt, Homo sapiens
  misc_RNA (1)...(19): siRNA sense strand
cauacaguuuggagcaaga

SEQ ID NO: 2670457 - RNA, 19 nt, Homo sapiens
  misc_RNA (1)...(19): siRNA sense strand
cuaagagcucucaggcuaa

SEQ ID NO: 2670458 - RNA, 19 nt, Homo sapiens
  misc_RNA (1)...(19): siRNA sense strand
acauauucucugugugauu

SEQ ID NO: 2670459 - RNA, 19 nt, Homo sapiens
  misc_RNA (1)...(19): siRNA sense strand
uggcauuguucuaucauuu

SEQ ID NO: 2670460 - RNA, 19 nt, Homo sapiens
  misc_RNA (1)...(19): siRNA sense strand
cggaaaagaaagaaagaac

SEQ ID NO: 2670461 - RNA, 19 nt, Homo sapiens
  misc_RNA (1)...(19): siRNA sense strand
auaauacaaucuugggaga

SEQ ID NO: 2670462 - RNA, 19 nt, Homo sapiens
  misc_RNA (1)...(19): siRNA sense strand
gaaagaugugucauggcaa

SEQ ID NO: 2670463 - RNA, 19 nt, Homo sapiens
  misc_RNA (1)...(19): siRNA sense strand
aaagaugugucauggcaau

SEQ ID NO: 2670464 - RNA, 19 nt, Homo sapiens
  misc_RNA (1)...(19): siRNA sense strand
cuggacuacagcagaauaa

SEQ ID NO: 2670465 - RNA, 19 nt, Homo sapiens
  misc_RNA (1)...(19): siRNA sense strand
gggaaagccacccaggaga

SEQ ID NO: 2670466 - RNA, 19 nt, Homo sapiens
  misc_RNA (1)...(19): siRNA sense strand
uaccaaaggcagacaucua

SEQ ID NO: 2670467 - RNA, 19 nt, Homo sapiens
  misc_RNA (1)...(19): siRNA sense strand
caguguagccaaucaagua

SEQ ID NO: 2670468 - RNA, 19 nt, Homo sapiens
  misc_RNA (1)...(19): siRNA sense strand
ccugaaagagagguggaua

SEQ ID NO: 2670469 - RNA, 19 nt, Homo sapiens
  misc_RNA (1)...(19): siRNA sense strand
guucagaagaggaauuuca

SEQ ID NO: 2670470 - RNA, 19 nt, Homo sapiens
  misc_RNA (1)...(19): siRNA sense strand
ccgaaagaccccucugaaa

SEQ ID NO: 2670471 - RNA, 19 nt, Homo sapiens
  misc_RNA (1)...(19): siRNA sense strand
acaguuggaucuggagaaa

SEQ ID NO: 2670472 - RNA, 19 nt, Homo sapiens
  misc_RNA (1)...(19): siRNA sense strand
augcugagaaggaggauca

SEQ ID NO: 2670473 - RNA, 19 nt, Homo sapiens
  misc_RNA (1)...(19): siRNA sense strand
auucaaacaccuuaggaca

SEQ ID NO: 2670474 - RNA, 19 nt, Homo sapiens
  misc_RNA (1)...(19): siRNA sense strand
aaagagagacgaaugaaaa

SEQ ID NO: 2670475 - RNA, 19 nt, Homo sapiens
  misc_RNA (1)...(19): siRNA sense strand
gagaucuaaaccagacaaa

SEQ ID NO: 2670476 - RNA, 19 nt, Homo sapiens
  misc_RNA (1)...(19): siRNA sense strand
caaguucagaagaggaauu

SEQ ID NO: 2670477 - RNA, 19 nt, Homo sapiens
  misc_RNA (1)...(19): siRNA sense strand
agaauuguauagaggucuu

SEQ ID NO: 2670478 - RNA, 19 nt, Homo sapiens
  misc_RNA (1)...(19): siRNA sense strand
guuagaacugccugaaaga

SEQ ID NO: 2670479 - RNA, 19 nt, Homo sapiens
  misc_RNA (1)...(19): siRNA sense strand
ccuuggagcaucagaaguu

SEQ ID NO: 2670480 - RNA, 19 nt, Homo sapiens
  misc_RNA (1)...(19): siRNA sense strand
cugaaagagagguggauaa

SEQ ID NO: 2670481 - RNA, 19 nt, Homo sapiens
  misc_RNA (1)...(19): siRNA sense strand
ggagaauggaacagggaau

SEQ ID NO: 2670482 - RNA, 19 nt, Homo sapiens
  misc_RNA (1)...(19): siRNA sense strand
gcauagaagcagagaucau

SEQ ID NO: 2670483 - RNA, 19 nt, Homo sapiens
  misc_RNA (1)...(19): siRNA sense strand
cagcagaggagcaggaauu

SEQ ID NO: 2670484 - RNA, 19 nt, Homo sapiens
  misc_RNA (1)...(19): siRNA sense strand
gaacauggaucuauggaga

SEQ ID NO: 2670485 - RNA, 19 nt, Homo sapiens
  misc_RNA (1)...(19): siRNA sense strand
ccuaagagcucucaggcua

SEQ ID NO: 2670486 - RNA, 19 nt, Homo sapiens
  misc_RNA (1)...(19): siRNA sense strand
acgaagaccuguuggugaa

SEQ ID NO: 2670487 - RNA, 19 nt, Homo sapiens
  misc_RNA (1)...(19): siRNA sense strand
agaacaagaagaugagaau

SEQ ID NO: 2670488 - RNA, 19 nt, Homo sapiens
  misc_RNA (1)...(19): siRNA sense strand
augagaagcaugagaagua

SEQ ID NO: 2670489 - RNA, 19 nt, Homo sapiens
  misc_RNA (1)...(19): siRNA sense strand
gguagauaaaucagaguau

SEQ ID NO: 2670490 - RNA, 19 nt, Homo sapiens
  misc_RNA (1)...(19): siRNA sense strand
aguuggaucuggagaaaga

SEQ ID NO: 2670491 - RNA, 19 nt, Homo sapiens
  misc_RNA (1)...(19): siRNA sense strand
aauacaaucuugggagaaa

SEQ ID NO: 2670492 - RNA, 19 nt, Homo sapiens
  misc_RNA (1)...(19): siRNA sense strand
ccuaagagcacccgggaca

SEQ ID NO: 2670493 - RNA, 19 nt, Homo sapiens
  misc_RNA (1)...(19): siRNA sense strand
ugaagaaguaccaggaaca

SEQ ID NO: 2670494 - RNA, 19 nt, Homo sapiens
  misc_RNA (1)...(19): siRNA sense strand
uagaagaacaagaagauga

SEQ ID NO: 2670495 - RNA, 19 nt, Homo sapiens
  misc_RNA (1)...(19): siRNA sense strand
agauugagcacgugaccaa

SEQ ID NO: 2670496 - RNA, 19 nt, Homo sapiens
  misc_RNA (1)...(19): siRNA sense strand
guucauaagaagaauguca

SEQ ID NO: 2670497 - RNA, 19 nt, Homo sapiens
  misc_RNA (1)...(19): siRNA sense strand
aggccggagucaaggaaau

SEQ ID NO: 2670498 - RNA, 19 nt, Homo sapiens
  misc_RNA (1)...(19): siRNA sense strand
cagcauagaagcagagauc

SEQ ID NO: 2670499 - RNA, 19 nt, Homo sapiens
  misc_RNA (1)...(19): siRNA sense strand
uguacaguaucgagaauau

SEQ ID NO: 2670500 - RNA, 19 nt, Homo sapiens
  misc_RNA (1)...(19): siRNA sense strand
gagaaggagauaaggucau

SEQ ID NO: 2670501 - RNA, 19 nt, Homo sapiens
  misc_RNA (1)...(19): siRNA sense strand
gggaauacgcuauguucau

SEQ ID NO: 2670502 - RNA, 19 nt, Homo sapiens
  misc_RNA (1)...(19): siRNA sense strand
ggaaagucaaacaaagaga

SEQ ID NO: 2670503 - RNA, 19 nt, Homo sapiens
  misc_RNA (1)...(19): siRNA sense strand
ucacagaugaacagcgauu

SEQ ID NO: 2670504 - RNA, 19 nt, Homo sapiens
  misc_RNA (1)...(19): siRNA sense strand
guggaugaauuaaaggaga

SEQ ID NO: 2670505 - RNA, 19 nt, Homo sapiens
  misc_RNA (1)...(19): siRNA sense strand
agggaaagucaaacaaaga

SEQ ID NO: 2670506 - RNA, 19 nt, Homo sapiens
  misc_RNA (1)...(19): siRNA sense strand
cgaaagaccccucugaaaa

SEQ ID NO: 2670507 - RNA, 19 nt, Homo sapiens
  misc_RNA (1)...(19): siRNA sense strand
ggagaaggagauaagguca

SEQ ID NO: 2670508 - RNA, 19 nt, Homo sapiens
  misc_RNA (1)...(19): siRNA sense strand
aagaacaagaagaugagaa

SEQ ID NO: 2670509 - RNA, 19 nt, Homo sapiens
  misc_RNA (1)...(19): siRNA sense strand
aggagaaggcccuggaguu

SEQ ID NO: 2670510 - RNA, 19 nt, Homo sapiens
  misc_RNA (1)...(19): siRNA sense strand
gcuuacagcacgaggaucu

SEQ ID NO: 2670511 - RNA, 19 nt, Homo sapiens
  misc_RNA (1)...(19): siRNA sense strand
gcuuaggagugcugccuuu

SEQ ID NO: 2670512 - RNA, 19 nt, Homo sapiens
  misc_RNA (1)...(19): siRNA sense strand
agccagagcucuuaaccaa

SEQ ID NO: 2670513 - RNA, 19 nt, Homo sapiens
  misc_RNA (1)...(19): siRNA sense strand
gaacagggaauauggacga

SEQ ID NO: 2670514 - RNA, 19 nt, Homo sapiens
  misc_RNA (1)...(19): siRNA sense strand
ucaaacaaagagagacgaa

SEQ ID NO: 2670515 - RNA, 19 nt, Homo sapiens
  misc_RNA (1)...(19): siRNA sense strand
agaucaagcuuuuggcaau

SEQ ID NO: 2670516 - RNA, 19 nt, Homo sapiens
  misc_RNA (1)...(19): siRNA sense strand
ggaaaagaaagaaagaaca

SEQ ID NO: 2670517 - RNA, 19 nt, Homo sapiens
  misc_RNA (1)...(19): siRNA sense strand
ugccaaggugguagauaaa

SEQ ID NO: 2670518 - RNA, 19 nt, Homo sapiens
  misc_RNA (1)...(19): siRNA sense strand
ucucaggcaugaaggaaga

SEQ ID NO: 2670519 - RNA, 19 nt, Homo sapiens
  misc_RNA (1)...(19): siRNA sense strand
augacauggccuuggcaaa

SEQ ID NO: 2670520 - RNA, 19 nt, Homo sapiens
  misc_RNA (1)...(19): siRNA sense strand
gaguaugacaugaagaagu

SEQ ID NO: 2670521 - RNA, 19 nt, Homo sapiens
  misc_RNA (1)...(19): siRNA sense strand
ggagagaagauauugagau

SEQ ID NO: 2670522 - RNA, 19 nt, Homo sapiens
  misc_RNA (1)...(19): siRNA sense strand
cauacaguuuggagcaaga

SEQ ID NO: 2670523 - RNA, 19 nt, Homo sapiens
  misc_RNA (1)...(19): siRNA sense strand
cuaagagcucucaggcuaa

SEQ ID NO: 2670524 - RNA, 19 nt, Homo sapiens
  misc_RNA (1)...(19): siRNA sense strand
acauauucucugugugauu

SEQ ID NO: 2670525 - RNA, 19 nt, Homo sapiens
  misc_RNA (1)...(19): siRNA sense strand
uggcauuguucuaucauuu

SEQ ID NO: 2670526 - RNA, 19 nt, Homo sapiens
  misc_RNA (1)...(19): siRNA sense strand
cggaaaagaaagaaagaac

SEQ ID NO: 2670527 - RNA, 19 nt, Homo sapiens
  misc_RNA (1)...(19): siRNA sense strand
auaauacaaucuugggaga

SEQ ID NO: 2670528 - RNA, 19 nt, Homo sapiens
  misc_RNA (1)...(19): siRNA sense strand
gaaagaugugucauggcaa

SEQ ID NO: 2670529 - RNA, 19 nt, Homo sapiens
  misc_RNA (1)...(19): siRNA sense strand
aaagaugugucauggcaau

SEQ ID NO: 2670530 - RNA, 19 nt, Homo sapiens
  misc_RNA (1)...(19): siRNA sense strand
cuggacuacagcagaauaa

SEQ ID NO: 2670531 - RNA, 19 nt, Homo sapiens
  misc_RNA (1)...(19): siRNA sense strand
gggaaagccacccaggaga

SEQ ID NO: 2670532 - RNA, 19 nt, Homo sapiens
  misc_RNA (1)...(19): siRNA sense strand
uaccaaaggcagacaucua

SEQ ID NO: 2670533 - RNA, 19 nt, Homo sapiens
  misc_RNA (1)...(19): siRNA sense strand
caguguagccaaucaagua

SEQ ID NO: 2670534 - RNA, 19 nt, Homo sapiens
  misc_RNA (1)...(19): siRNA sense strand
ccugaaagagagguggaua

SEQ ID NO: 2670535 - RNA, 19 nt, Homo sapiens
  misc_RNA (1)...(19): siRNA sense strand
guucagaagaggaauuuca

SEQ ID NO: 2670536 - RNA, 19 nt, Homo sapiens
  misc_RNA (1)...(19): siRNA sense strand
ccgaaagaccccucugaaa

SEQ ID NO: 2670537 - RNA, 19 nt, Homo sapiens
  misc_RNA (1)...(19): siRNA sense strand
acaguuggaucuggagaaa

SEQ ID NO: 2670538 - RNA, 19 nt, Homo sapiens
  misc_RNA (1)...(19): siRNA sense strand
augcugagaaggaggauca

SEQ ID NO: 2670539 - RNA, 19 nt, Homo sapiens
  misc_RNA (1)...(19): siRNA sense strand
auucaaacaccuuaggaca

SEQ ID NO: 2670540 - RNA, 19 nt, Homo sapiens
  misc_RNA (1)...(19): siRNA sense strand
aaagagagacgaaugaaaa

SEQ ID NO: 2670541 - RNA, 19 nt, Homo sapiens
  misc_RNA (1)...(19): siRNA sense strand
gagaucuaaaccagacaaa

SEQ ID NO: 2670542 - RNA, 19 nt, Homo sapiens
  misc_RNA (1)...(19): siRNA sense strand
caaguucagaagaggaauu

SEQ ID NO: 2670543 - RNA, 19 nt, Homo sapiens
  misc_RNA (1)...(19): siRNA sense strand
agaauuguauagaggucuu

SEQ ID NO: 2670544 - RNA, 19 nt, Homo sapiens
  misc_RNA (1)...(19): siRNA sense strand
guuagaacugccugaaaga

SEQ ID NO: 2670545 - RNA, 19 nt, Homo sapiens
  misc_RNA (1)...(19): siRNA sense strand
ccuuggagcaucagaaguu

SEQ ID NO: 2670546 - RNA, 19 nt, Homo sapiens
  misc_RNA (1)...(19): siRNA sense strand
gaacagaacagaagggaca

SEQ ID NO: 2670547 - RNA, 19 nt, Homo sapiens
  misc_RNA (1)...(19): siRNA sense strand
aagaaauggaggaagcaaa

SEQ ID NO: 2670548 - RNA, 19 nt, Homo sapiens
  misc_RNA (1)...(19): siRNA sense strand
acgcagaagaaacaagaaa

SEQ ID NO: 2670549 - RNA, 19 nt, Homo sapiens
  misc_RNA (1)...(19): siRNA sense strand
ggaagcuagaugagaggaa

SEQ ID NO: 2670550 - RNA, 19 nt, Homo sapiens
  misc_RNA (1)...(19): siRNA sense strand
agucagaagagaaggcaga

SEQ ID NO: 2670551 - RNA, 19 nt, Homo sapiens
  misc_RNA (1)...(19): siRNA sense strand
gaaagaaagguucggguca

SEQ ID NO: 2670552 - RNA, 19 nt, Homo sapiens
  misc_RNA (1)...(19): siRNA sense strand
ggaaccggcucuugggaga

SEQ ID NO: 2670553 - RNA, 19 nt, Homo sapiens
  misc_RNA (1)...(19): siRNA sense strand
gugucaaucccgaggaaca

SEQ ID NO: 2670554 - RNA, 19 nt, Homo sapiens
  misc_RNA (1)...(19): siRNA sense strand
acaaagaugagcugcacaa

SEQ ID NO: 2670555 - RNA, 19 nt, Homo sapiens
  misc_RNA (1)...(19): siRNA sense strand
cuauugaucgggaaggaaa

SEQ ID NO: 2670556 - RNA, 19 nt, Homo sapiens
  misc_RNA (1)...(19): siRNA sense strand
uggaagaagaccauggaga

SEQ ID NO: 2670557 - RNA, 19 nt, Homo sapiens
  misc_RNA (1)...(19): siRNA sense strand
agguggaucuagagcgaga

SEQ ID NO: 2670558 - RNA, 19 nt, Homo sapiens
  misc_RNA (1)...(19): siRNA sense strand
gugcaaagagcgaguccau

SEQ ID NO: 2670559 - RNA, 19 nt, Homo sapiens
  misc_RNA (1)...(19): siRNA sense strand
ccgaggaacaacugauuau

SEQ ID NO: 2670560 - RNA, 19 nt, Homo sapiens
  misc_RNA (1)...(19): siRNA sense strand
agaguauggaggagaauca

SEQ ID NO: 2670561 - RNA, 19 nt, Homo sapiens
  misc_RNA (1)...(19): siRNA sense strand
aggcagaugaggcgaccaa

SEQ ID NO: 2670562 - RNA, 19 nt, Homo sapiens
  misc_RNA (1)...(19): siRNA sense strand
aggagaaucaggacuuaaa

SEQ ID NO: 2670563 - RNA, 19 nt, Homo sapiens
  misc_RNA (1)...(19): siRNA sense strand
auguggaucugcagaggaa

SEQ ID NO: 2670564 - RNA, 19 nt, Homo sapiens
  misc_RNA (1)...(19): siRNA sense strand
agcgagagcuagaacacaa

SEQ ID NO: 2670565 - RNA, 19 nt, Homo sapiens
  misc_RNA (1)...(19): siRNA sense strand
aggcagauuuugugauuau

SEQ ID NO: 2670566 - RNA, 19 nt, Homo sapiens
  misc_RNA (1)...(19): siRNA sense strand
gaggaacaacugauuauaa

SEQ ID NO: 2670567 - RNA, 19 nt, Homo sapiens
  misc_RNA (1)...(19): siRNA sense strand
ccagaaacuuacaggggau

SEQ ID NO: 2670568 - RNA, 19 nt, Homo sapiens
  misc_RNA (1)...(19): siRNA sense strand
caaagagguuggaggaggu

SEQ ID NO: 2670569 - RNA, 19 nt, Homo sapiens
  misc_RNA (1)...(19): siRNA sense strand
ccagguggaucuagagcga

SEQ ID NO: 2670570 - RNA, 19 nt, Homo sapiens
  misc_RNA (1)...(19): siRNA sense strand
caagagcuacugagggcaa

SEQ ID NO: 2670571 - RNA, 19 nt, Homo sapiens
  misc_RNA (1)...(19): siRNA sense strand
gggaaggaaaucaccggua

SEQ ID NO: 2670572 - RNA, 19 nt, Homo sapiens
  misc_RNA (1)...(19): siRNA sense strand
ucaauauaccaaagagguu

SEQ ID NO: 2670573 - RNA, 19 nt, Homo sapiens
  misc_RNA (1)...(19): siRNA sense strand
aguccaauccacagugcaa

SEQ ID NO: 2670574 - RNA, 19 nt, Homo sapiens
  misc_RNA (1)...(19): siRNA sense strand
uaaagaaggaacugcugaa

SEQ ID NO: 2670575 - RNA, 19 nt, Homo sapiens
  misc_RNA (1)...(19): siRNA sense strand
uuauggagacgcagaagaa

SEQ ID NO: 2670576 - RNA, 19 nt, Homo sapiens
  misc_RNA (1)...(19): siRNA sense strand
gguuggaggaggugacguu

SEQ ID NO: 2670577 - RNA, 19 nt, Homo sapiens
  misc_RNA (1)...(19): siRNA sense strand
uggaggaagcaaagaaaau

SEQ ID NO: 2670578 - RNA, 19 nt, Homo sapiens
  misc_RNA (1)...(19): siRNA sense strand
ggaggagaaucaggacuua

SEQ ID NO: 2670579 - RNA, 19 nt, Homo sapiens
  misc_RNA (1)...(19): siRNA sense strand
aggugacguuaaaggauuu

SEQ ID NO: 2670580 - RNA, 19 nt, Homo sapiens
  misc_RNA (1)...(19): siRNA sense strand
agaacagaagggacagauu

SEQ ID NO: 2670581 - RNA, 19 nt, Homo sapiens
  misc_RNA (1)...(19): siRNA sense strand
uagaagaagcacuccggaa

SEQ ID NO: 2670582 - RNA, 19 nt, Homo sapiens
  misc_RNA (1)...(19): siRNA sense strand
aagaccauggagagaauua

SEQ ID NO: 2670583 - RNA, 19 nt, Homo sapiens
  misc_RNA (1)...(19): siRNA sense strand
cugaaggaauagagaacag

SEQ ID NO: 2670584 - RNA, 19 nt, Homo sapiens
  misc_RNA (1)...(19): siRNA sense strand
gaucagaguauggaggaga

SEQ ID NO: 2670585 - RNA, 19 nt, Homo sapiens
  misc_RNA (1)...(19): siRNA sense strand
agaaucaggacuuaaagaa

SEQ ID NO: 2670586 - RNA, 19 nt, Homo sapiens
  misc_RNA (1)...(19): siRNA sense strand
gcgagagcuagaacacaaa

SEQ ID NO: 2670587 - RNA, 19 nt, Homo sapiens
  misc_RNA (1)...(19): siRNA sense strand
ccgcugaaggaauagagaa

SEQ ID NO: 2670588 - RNA, 19 nt, Homo sapiens
  misc_RNA (1)...(19): siRNA sense strand
aaacaagaagccagaaacu

SEQ ID NO: 2670589 - RNA, 19 nt, Homo sapiens
  misc_RNA (1)...(19): siRNA sense strand
cgaccaacuacaacaguca

SEQ ID NO: 2670590 - RNA, 19 nt, Homo sapiens
  misc_RNA (1)...(19): siRNA sense strand
ggaagaagaccauggagag

SEQ ID NO: 2670591 - RNA, 19 nt, Homo sapiens
  misc_RNA (1)...(19): siRNA sense strand
acucaaguagguagugaau

SEQ ID NO: 2670592 - RNA, 19 nt, Homo sapiens
  misc_RNA (1)...(19): siRNA sense strand
uaucaggacuacaggccuu

SEQ ID NO: 2670593 - RNA, 19 nt, Homo sapiens
  misc_RNA (1)...(19): siRNA sense strand
uggaggagaaucaggacuu

SEQ ID NO: 2670594 - RNA, 19 nt, Homo sapiens
  misc_RNA (1)...(19): siRNA sense strand
gcacugucaaagaggagau

SEQ ID NO: 2670595 - RNA, 19 nt, Homo sapiens
  misc_RNA (1)...(19): siRNA sense strand
aggaauagagaacagaaca

SEQ ID NO: 2670596 - RNA, 19 nt, Homo sapiens
  misc_RNA (1)...(19): siRNA sense strand
cuggagaccucaugggaag

SEQ ID NO: 2670597 - RNA, 19 nt, Homo sapiens
  misc_RNA (1)...(19): siRNA sense strand
aaauggaggaagcaaagaa

SEQ ID NO: 2670598 - RNA, 19 nt, Homo sapiens
  misc_RNA (1)...(19): siRNA sense strand
aauggaggaagcaaagaaa

SEQ ID NO: 2670599 - RNA, 19 nt, Homo sapiens
  misc_RNA (1)...(19): siRNA sense strand
ggaacugcugaaauguaaa

SEQ ID NO: 2670600 - RNA, 19 nt, Homo sapiens
  misc_RNA (1)...(19): siRNA sense strand
cgcugaaggaauagagaac

SEQ ID NO: 2670601 - RNA, 19 nt, Homo sapiens
  misc_RNA (1)...(19): siRNA sense strand
ggaauagagaacagaacag

SEQ ID NO: 2670602 - RNA, 19 nt, Homo sapiens
  misc_RNA (1)...(19): siRNA sense strand
gaaccuaucuggagaccuc

SEQ ID NO: 2670603 - RNA, 19 nt, Homo sapiens
  misc_RNA (1)...(19): siRNA sense strand
cugugaaccaggugucaau

SEQ ID NO: 2670604 - RNA, 19 nt, Homo sapiens
  misc_RNA (1)...(19): siRNA sense strand
aagaaggaacugcugaaau

SEQ ID NO: 2670605 - RNA, 19 nt, Homo sapiens
  misc_RNA (1)...(19): siRNA sense strand
cugucaaagaggagauuuu

SEQ ID NO: 2670606 - RNA, 19 nt, Homo sapiens
  misc_RNA (1)...(19): siRNA sense strand
augccuugcagcagagauu

SEQ ID NO: 2670607 - RNA, 19 nt, Homo sapiens
  misc_RNA (1)...(19): siRNA sense strand
uggagacgcagaagaaaca

SEQ ID NO: 2670608 - RNA, 19 nt, Homo sapiens
  misc_RNA (1)...(19): siRNA sense strand
cauaaaggacaaugggaca

SEQ ID NO: 2670609 - RNA, 19 nt, Homo sapiens
  misc_RNA (1)...(19): siRNA sense strand
gggcugaagaagaggagca

SEQ ID NO: 2670610 - RNA, 19 nt, Homo sapiens
  misc_RNA (1)...(19): siRNA sense strand
ggcuauaagaagucaucua

SEQ ID NO: 2670611 - RNA, 19 nt, Homo sapiens
  misc_RNA (1)...(19): siRNA sense strand
cugaucaggaggaggaaga

SEQ ID NO: 2670612 - RNA, 19 nt, Homo sapiens
  misc_RNA (1)...(19): siRNA sense strand
gcguguauggcgaggcuuu

SEQ ID NO: 2670613 - RNA, 19 nt, Homo sapiens
  misc_RNA (1)...(19): siRNA sense strand
aggaggaagaggcguguau

SEQ ID NO: 2670614 - RNA, 19 nt, Homo sapiens
  misc_RNA (1)...(19): siRNA sense strand
ccauaauauucccaugaca

SEQ ID NO: 2670615 - RNA, 19 nt, Homo sapiens
  misc_RNA (1)...(19): siRNA sense strand
gcagagaggagcagcugga

SEQ ID NO: 2670616 - RNA, 19 nt, Homo sapiens
  misc_RNA (1)...(19): siRNA sense strand
cugaagaagaggagcaggu

SEQ ID NO: 2670617 - RNA, 19 nt, Homo sapiens
  misc_RNA (1)...(19): siRNA sense strand
gaagaggcguguauggcga

SEQ ID NO: 2670618 - RNA, 19 nt, Homo sapiens
  misc_RNA (1)...(19): siRNA sense strand
acacugaucaggaggagga

SEQ ID NO: 2670619 - RNA, 19 nt, Homo sapiens
  misc_RNA (1)...(19): siRNA sense strand
cugacaagcuuacuauaga

SEQ ID NO: 2670620 - RNA, 19 nt, Homo sapiens
  misc_RNA (1)...(19): siRNA sense strand
ggacauggcuggagaccuu

SEQ ID NO: 2670621 - RNA, 19 nt, Homo sapiens
  misc_RNA (1)...(19): siRNA sense strand
gggaagagggagagucaga

SEQ ID NO: 2670622 - RNA, 19 nt, Homo sapiens
  misc_RNA (1)...(19): siRNA sense strand
aggaagagcgagacagaga

SEQ ID NO: 2670623 - RNA, 19 nt, Homo sapiens
  misc_RNA (1)...(19): siRNA sense strand
agggagagucagaaagaau

SEQ ID NO: 2670624 - RNA, 19 nt, Homo sapiens
  misc_RNA (1)...(19): siRNA sense strand
gaagagggagagucagaaa

SEQ ID NO: 2670625 - RNA, 19 nt, Homo sapiens
  misc_RNA (1)...(19): siRNA sense strand
ggaggaagagcgagacaga

SEQ ID NO: 2670626 - RNA, 19 nt, Homo sapiens
  misc_RNA (1)...(19): siRNA sense strand
gagggaggacagacagaaa

SEQ ID NO: 2670627 - RNA, 19 nt, Homo sapiens
  misc_RNA (1)...(19): siRNA sense strand
gaagagcgagacagagaaa

SEQ ID NO: 2670628 - RNA, 19 nt, Homo sapiens
  misc_RNA (1)...(19): siRNA sense strand
caugggaacuggacaggaa

SEQ ID NO: 2670629 - RNA, 19 nt, Homo sapiens
  misc_RNA (1)...(19): siRNA sense strand
uggaugagcuccuggacau

SEQ ID NO: 2670630 - RNA, 19 nt, Homo sapiens
  misc_RNA (1)...(19): siRNA sense strand
cuggagaccuucacaccaa

SEQ ID NO: 2670631 - RNA, 19 nt, Homo sapiens
  misc_RNA (1)...(19): siRNA sense strand
agagggagagucagaaaga

SEQ ID NO: 2670632 - RNA, 19 nt, Homo sapiens
  misc_RNA (1)...(19): siRNA sense strand
gcggaggaagagcgagaca

SEQ ID NO: 2670633 - RNA, 19 nt, Homo sapiens
  misc_RNA (1)...(19): siRNA sense strand
uggagauugacguggauga

SEQ ID NO: 2670634 - RNA, 19 nt, Homo sapiens
  misc_RNA (1)...(19): siRNA sense strand
ggaagagcgagacagagaa

SEQ ID NO: 2670635 - RNA, 19 nt, Homo sapiens
  misc_RNA (1)...(19): siRNA sense strand
cagugaggcgccaagggaa

SEQ ID NO: 2670636 - RNA, 19 nt, Homo sapiens
  misc_RNA (1)...(19): siRNA sense strand
agaacaaagucuaagggaa

SEQ ID NO: 2670637 - RNA, 19 nt, Homo sapiens
  misc_RNA (1)...(19): siRNA sense strand
gaacaaagucuaagggaag

SEQ ID NO: 2670638 - RNA, 19 nt, Homo sapiens
  misc_RNA (1)...(19): siRNA sense strand
cugaggaggaugaggacaa

SEQ ID NO: 2670639 - RNA, 19 nt, Homo sapiens
  misc_RNA (1)...(19): siRNA sense strand
ggaaagagauucaaaccca

SEQ ID NO: 2670640 - RNA, 19 nt, Homo sapiens
  misc_RNA (1)...(19): siRNA sense strand
gcuuggaaccagagagcuu

SEQ ID NO: 2670641 - RNA, 19 nt, Homo sapiens
  misc_RNA (1)...(19): siRNA sense strand
cuucauggacccagggauu

SEQ ID NO: 2670642 - RNA, 19 nt, Homo sapiens
  misc_RNA (1)...(19): siRNA sense strand
aggaugaggacaaggaaga

SEQ ID NO: 2670643 - RNA, 19 nt, Homo sapiens
  misc_RNA (1)...(19): siRNA sense strand
agacagaagaaguggccuu

SEQ ID NO: 2670644 - RNA, 19 nt, Homo sapiens
  misc_RNA (1)...(19): siRNA sense strand
caguggagauaaagggcau

SEQ ID NO: 2670645 - RNA, 19 nt, Homo sapiens
  misc_RNA (1)...(19): siRNA sense strand
cagggagagcugaggagaa

SEQ ID NO: 2670646 - RNA, 19 nt, Homo sapiens
  misc_RNA (1)...(19): siRNA sense strand
aggacaaggaagaugauuu

SEQ ID NO: 2670647 - RNA, 19 nt, Homo sapiens
  misc_RNA (1)...(19): siRNA sense strand
gagagaaguugcugcgcca

SEQ ID NO: 2670648 - RNA, 19 nt, Homo sapiens
  misc_RNA (1)...(19): siRNA sense strand
agagaucaccuuugggcaa

SEQ ID NO: 2670649 - RNA, 19 nt, Homo sapiens
  misc_RNA (1)...(19): siRNA sense strand
ccuauaagagccuggccaa

SEQ ID NO: 2670650 - RNA, 19 nt, Homo sapiens
  misc_RNA (1)...(19): siRNA sense strand
gggcaagacuccacuggga

SEQ ID NO: 2670651 - RNA, 19 nt, Homo sapiens
  misc_RNA (1)...(19): siRNA sense strand
gauaguagcuuauuggcca

SEQ ID NO: 2670652 - RNA, 19 nt, Homo sapiens
  misc_RNA (1)...(19): siRNA sense strand
uuacaaaacaguggagaua

SEQ ID NO: 2670653 - RNA, 19 nt, Homo sapiens
  misc_RNA (1)...(19): siRNA sense strand
auucaaacccagcaaguau

SEQ ID NO: 2670654 - RNA, 19 nt, Homo sapiens
  misc_RNA (1)...(19): siRNA sense strand
agauaacugugaagaucau

SEQ ID NO: 2670655 - RNA, 19 nt, Homo sapiens
  misc_RNA (1)...(19): siRNA sense strand
acugugaagaucauggaua

SEQ ID NO: 2670656 - RNA, 19 nt, Homo sapiens
  misc_RNA (1)...(19): siRNA sense strand
cagauaacugugaagauca

SEQ ID NO: 2670657 - RNA, 19 nt, Homo sapiens
  misc_RNA (1)...(19): siRNA sense strand
gaucauggauaauggcauc

SEQ ID NO: 2670658 - RNA, 19 nt, Homo sapiens
  misc_RNA (1)...(19): siRNA sense strand
agggaagccuggagauaac

SEQ ID NO: 2670659 - RNA, 19 nt, Homo sapiens
  misc_RNA (1)...(19): siRNA sense strand
uggagauaacagagagcca

SEQ ID NO: 2670660 - RNA, 19 nt, Homo sapiens
  misc_RNA (1)...(19): siRNA sense strand
auaauggcauccagggaga

SEQ ID NO: 2670661 - RNA, 19 nt, Homo sapiens
  misc_RNA (1)...(19): siRNA sense strand
gagcugaggaggaugagga

SEQ ID NO: 2670662 - RNA, 19 nt, Homo sapiens
  misc_RNA (1)...(19): siRNA sense strand
ggcagauaacugugaagau

SEQ ID NO: 2670663 - RNA, 19 nt, Homo sapiens
  misc_RNA (1)...(19): siRNA sense strand
gagucuggaaagagauuca

SEQ ID NO: 2670664 - RNA, 19 nt, Homo sapiens
  misc_RNA (1)...(19): siRNA sense strand
gggagaccaaagaaagaga

SEQ ID NO: 2670665 - RNA, 19 nt, Homo sapiens
  misc_RNA (1)...(19): siRNA sense strand
cugaggagaacaaagucua

SEQ ID NO: 2670666 - RNA, 19 nt, Homo sapiens
  misc_RNA (1)...(19): siRNA sense strand
gggcacaggcuuugagcug

SEQ ID NO: 2670667 - RNA, 19 nt, Homo sapiens
  misc_RNA (1)...(19): siRNA sense strand
cgcaugaaauggugugcca

SEQ ID NO: 2670668 - RNA, 19 nt, Homo sapiens
  misc_RNA (1)...(19): siRNA sense strand
ccucaauugcagagagcag

SEQ ID NO: 2670669 - RNA, 19 nt, Homo sapiens
  misc_RNA (1)...(19): siRNA sense strand
agaccaaggugaagcggaa

SEQ ID NO: 2670670 - RNA, 19 nt, Homo sapiens
  misc_RNA (1)...(19): siRNA sense strand
gagaagaagaagacgguga

SEQ ID NO: 2670671 - RNA, 19 nt, Homo sapiens
  misc_RNA (1)...(19): siRNA sense strand
acggagaagcugagggaga

SEQ ID NO: 2670672 - RNA, 19 nt, Homo sapiens
  misc_RNA (1)...(19): siRNA sense strand
aggacaagcggguggagaa

SEQ ID NO: 2670673 - RNA, 19 nt, Homo sapiens
  misc_RNA (1)...(19): siRNA sense strand
gugaagcacuggaaggaca

SEQ ID NO: 2670674 - RNA, 19 nt, Homo sapiens
  misc_RNA (1)...(19): siRNA sense strand
agaagaaggcuaucaaguu

SEQ ID NO: 2670675 - RNA, 19 nt, Homo sapiens
  misc_RNA (1)...(19): siRNA sense strand
gagaagaaggcuaucaagu

SEQ ID NO: 2670676 - RNA, 19 nt, Homo sapiens
  misc_RNA (1)...(19): siRNA sense strand
ggcugauguacaaggacaa

SEQ ID NO: 2670677 - RNA, 19 nt, Homo sapiens
  misc_RNA (1)...(19): siRNA sense strand
gcaaacugggcaaacgcua

SEQ ID NO: 2670678 - RNA, 19 nt, Homo sapiens
  misc_RNA (1)...(19): siRNA sense strand
uggcugauguacaaggaca

SEQ ID NO: 2670679 - RNA, 19 nt, Homo sapiens
  misc_RNA (1)...(19): siRNA sense strand
ccacggagaagcugaggga

SEQ ID NO: 2670680 - RNA, 19 nt, Homo sapiens
  misc_RNA (1)...(19): siRNA sense strand
cgcagugagaagaaggcua

SEQ ID NO: 2670681 - RNA, 19 nt, Homo sapiens
  misc_RNA (1)...(19): siRNA sense strand
gccaaggacuucagcggca

SEQ ID NO: 2670682 - RNA, 19 nt, Homo sapiens
  misc_RNA (1)...(19): siRNA sense strand
acuccaucaucgugaacau

SEQ ID NO: 2670683 - RNA, 19 nt, Homo sapiens
  misc_RNA (1)...(19): siRNA sense strand
ggaaggaucugaagccaug

SEQ ID NO: 2670684 - RNA, 19 nt, Homo sapiens
  misc_RNA (1)...(19): siRNA sense strand
gaagaaggcuaucaaguug

SEQ ID NO: 2670685 - RNA, 19 nt, Homo sapiens
  misc_RNA (1)...(19): siRNA sense strand
ggguaauaugcaugaagua

SEQ ID NO: 2670686 - RNA, 19 nt, Homo sapiens
  misc_RNA (1)...(19): siRNA sense strand
ccaguuauaugcagggcua

SEQ ID NO: 2670687 - RNA, 19 nt, Homo sapiens
  misc_RNA (1)...(19): siRNA sense strand
cggagaaacgggugcccaa

SEQ ID NO: 2670688 - RNA, 19 nt, Homo sapiens
  misc_RNA (1)...(19): siRNA sense strand
agaacuguuuggugggcaa

SEQ ID NO: 2670689 - RNA, 19 nt, Homo sapiens
  misc_RNA (1)...(19): siRNA sense strand
gcaugaaguauuuagccaa

SEQ ID NO: 2670690 - RNA, 19 nt, Homo sapiens
  misc_RNA (1)...(19): siRNA sense strand
cccgagaggagcuggacaa

SEQ ID NO: 2670691 - RNA, 19 nt, Homo sapiens
  misc_RNA (1)...(19): siRNA sense strand
gacacuaaccggaggcaca

SEQ ID NO: 2670692 - RNA, 19 nt, Homo sapiens
  misc_RNA (1)...(19): siRNA sense strand
caucuugaguccagaggca

SEQ ID NO: 2670693 - RNA, 19 nt, Homo sapiens
  misc_RNA (1)...(19): siRNA sense strand
aggaugugguucaggaagu

SEQ ID NO: 2670694 - RNA, 19 nt, Homo sapiens
  misc_RNA (1)...(19): siRNA sense strand
gucuagaggaugugguuca

SEQ ID NO: 2670695 - RNA, 19 nt, Homo sapiens
  misc_RNA (1)...(19): siRNA sense strand
uggauggguuguagggcca

SEQ ID NO: 2670696 - RNA, 19 nt, Homo sapiens
  misc_RNA (1)...(19): siRNA sense strand
acgcguacauuaauggaca

SEQ ID NO: 2670697 - RNA, 19 nt, Homo sapiens
  misc_RNA (1)...(19): siRNA sense strand
gggcacugaauguggggaa

SEQ ID NO: 2670698 - RNA, 19 nt, Homo sapiens
  misc_RNA (1)...(19): siRNA sense strand
aagcaguggcagugaccuu

SEQ ID NO: 2670699 - RNA, 19 nt, Homo sapiens
  misc_RNA (1)...(19): siRNA sense strand
caguagugguggaagcucu

SEQ ID NO: 2670700 - RNA, 19 nt, Homo sapiens
  misc_RNA (1)...(19): siRNA sense strand
gauuggaacggaagcgcuu

SEQ ID NO: 2670701 - RNA, 19 nt, Homo sapiens
  misc_RNA (1)...(19): siRNA sense strand
ccucuugggccauugggaa

SEQ ID NO: 2670702 - RNA, 19 nt, Homo sapiens
  misc_RNA (1)...(19): siRNA sense strand
ggguaauaugcaugaagua

SEQ ID NO: 2670703 - RNA, 19 nt, Homo sapiens
  misc_RNA (1)...(19): siRNA sense strand
ccaguuauaugcagggcua

SEQ ID NO: 2670704 - RNA, 19 nt, Homo sapiens
  misc_RNA (1)...(19): siRNA sense strand
cggagaaacgggugcccaa

SEQ ID NO: 2670705 - RNA, 19 nt, Homo sapiens
  misc_RNA (1)...(19): siRNA sense strand
agaacuguuuggugggcaa

SEQ ID NO: 2670706 - RNA, 19 nt, Homo sapiens
  misc_RNA (1)...(19): siRNA sense strand
gcaugaaguauuuagccaa

SEQ ID NO: 2670707 - RNA, 19 nt, Homo sapiens
  misc_RNA (1)...(19): siRNA sense strand
cccgagaggagcuggacaa

SEQ ID NO: 2670708 - RNA, 19 nt, Homo sapiens
  misc_RNA (1)...(19): siRNA sense strand
gacacuaaccggaggcaca

SEQ ID NO: 2670709 - RNA, 19 nt, Homo sapiens
  misc_RNA (1)...(19): siRNA sense strand
caucuugaguccagaggca

SEQ ID NO: 2670710 - RNA, 19 nt, Homo sapiens
  misc_RNA (1)...(19): siRNA sense strand
aggaugugguucaggaagu

SEQ ID NO: 2670711 - RNA, 19 nt, Homo sapiens
  misc_RNA (1)...(19): siRNA sense strand
gucuagaggaugugguuca

SEQ ID NO: 2670712 - RNA, 19 nt, Homo sapiens
  misc_RNA (1)...(19): siRNA sense strand
uggauggguuguagggcca

SEQ ID NO: 2670713 - RNA, 19 nt, Homo sapiens
  misc_RNA (1)...(19): siRNA sense strand
acgcguacauuaauggaca

SEQ ID NO: 2670714 - RNA, 19 nt, Homo sapiens
  misc_RNA (1)...(19): siRNA sense strand
gggcacugaauguggggaa

SEQ ID NO: 2670715 - RNA, 19 nt, Homo sapiens
  misc_RNA (1)...(19): siRNA sense strand
aagcaguggcagugaccuu

SEQ ID NO: 2670716 - RNA, 19 nt, Homo sapiens
  misc_RNA (1)...(19): siRNA sense strand
caguagugguggaagcucu

SEQ ID NO: 2670717 - RNA, 19 nt, Homo sapiens
  misc_RNA (1)...(19): siRNA sense strand
gauuggaacggaagcgcuu

SEQ ID NO: 2670718 - RNA, 19 nt, Homo sapiens
  misc_RNA (1)...(19): siRNA sense strand
ccucuugggccauugggaa

SEQ ID NO: 2670719 - RNA, 19 nt, Homo sapiens
  misc_RNA (1)...(19): siRNA sense strand
ggucagagauggaaggaac

SEQ ID NO: 2670720 - RNA, 19 nt, Homo sapiens
  misc_RNA (1)...(19): siRNA sense strand
agagccagucagaaagaaa

SEQ ID NO: 2670721 - RNA, 19 nt, Homo sapiens
  misc_RNA (1)...(19): siRNA sense strand
cagaaagaaaagaggcaga

SEQ ID NO: 2670722 - RNA, 19 nt, Homo sapiens
  misc_RNA (1)...(19): siRNA sense strand
aggacgaggaggaggccau

SEQ ID NO: 2670723 - RNA, 19 nt, Homo sapiens
  misc_RNA (1)...(19): siRNA sense strand
aagaaaagaggcagaccua

SEQ ID NO: 2670724 - RNA, 19 nt, Homo sapiens
  misc_RNA (1)...(19): siRNA sense strand
cggucagccuccugcaaga

SEQ ID NO: 2670725 - RNA, 19 nt, Homo sapiens
  misc_RNA (1)...(19): siRNA sense strand
aagacagggaaguggcaga

SEQ ID NO: 2670726 - RNA, 19 nt, Homo sapiens
  misc_RNA (1)...(19): siRNA sense strand
gugaggagccgaagcagca

SEQ ID NO: 2670727 - RNA, 19 nt, Homo sapiens
  misc_RNA (1)...(19): siRNA sense strand
gggaagaagaggaagagga

SEQ ID NO: 2670728 - RNA, 19 nt, Homo sapiens
  misc_RNA (1)...(19): siRNA sense strand
cagaagaagcgguggagca

SEQ ID NO: 2670729 - RNA, 19 nt, Homo sapiens
  misc_RNA (1)...(19): siRNA sense strand
aagaagaggaagaggagga

SEQ ID NO: 2670730 - RNA, 19 nt, Homo sapiens
  misc_RNA (1)...(19): siRNA sense strand
aagaggaagaggaggaaga

SEQ ID NO: 2670731 - RNA, 19 nt, Homo sapiens
  misc_RNA (1)...(19): siRNA sense strand
ggagaaaggcugaggcccu

SEQ ID NO: 2670732 - RNA, 19 nt, Homo sapiens
  misc_RNA (1)...(19): siRNA sense strand
aggccgagcuagagggacu

SEQ ID NO: 2670733 - RNA, 19 nt, Homo sapiens
  misc_RNA (1)...(19): siRNA sense strand
gcucagaggccuugacgga

SEQ ID NO: 2670734 - RNA, 19 nt, Homo sapiens
  misc_RNA (1)...(19): siRNA sense strand
gaggagagacagagggaag

SEQ ID NO: 2670735 - RNA, 19 nt, Homo sapiens
  misc_RNA (1)...(19): siRNA sense strand
uggaggaggcugagaggga

SEQ ID NO: 2670736 - RNA, 19 nt, Homo sapiens
  misc_RNA (1)...(19): siRNA sense strand
gagaugagcuggaagccca

SEQ ID NO: 2670737 - RNA, 19 nt, Homo sapiens
  misc_RNA (1)...(19): siRNA sense strand
guucagaaggcaagggaug

SEQ ID NO: 2670738 - RNA, 19 nt, Homo sapiens
  misc_RNA (1)...(19): siRNA sense strand
gggaggagagacagaggga

SEQ ID NO: 2670739 - RNA, 19 nt, Homo sapiens
  misc_RNA (1)...(19): siRNA sense strand
uggaggugcuggaggagga

SEQ ID NO: 2670740 - RNA, 19 nt, Homo sapiens
  misc_RNA (1)...(19): siRNA sense strand
augcgaugcugguggcaga

SEQ ID NO: 2670741 - RNA, 19 nt, Homo sapiens
  misc_RNA (1)...(19): siRNA sense strand
aggagaauguggagcugga

SEQ ID NO: 2670742 - RNA, 19 nt, Homo sapiens
  misc_RNA (1)...(19): siRNA sense strand
gccaggaauuucugcgaga

SEQ ID NO: 2670743 - RNA, 19 nt, Homo sapiens
  misc_RNA (1)...(19): siRNA sense strand
acucagugcucgaggcauc

SEQ ID NO: 2670744 - RNA, 19 nt, Homo sapiens
  misc_RNA (1)...(19): siRNA sense strand
aggagggcccugagcacaa

SEQ ID NO: 2670745 - RNA, 19 nt, Homo sapiens
  misc_RNA (1)...(19): siRNA sense strand
agagucagcuggaggagga

SEQ ID NO: 2670746 - RNA, 19 nt, Homo sapiens
  misc_RNA (1)...(19): siRNA sense strand
guugcugggaggagagaca

SEQ ID NO: 2670747 - RNA, 19 nt, Homo sapiens
  misc_RNA (1)...(19): siRNA sense strand
ggaagaagaggaagaggag

SEQ ID NO: 2670748 - RNA, 19 nt, Homo sapiens
  misc_RNA (1)...(19): siRNA sense strand
ccgagaagucugugcugga

SEQ ID NO: 2670749 - RNA, 19 nt, Homo sapiens
  misc_RNA (1)...(19): siRNA sense strand
accgagaccucaaggccaa

SEQ ID NO: 2670750 - RNA, 19 nt, Homo sapiens
  misc_RNA (1)...(19): siRNA sense strand
cugugcagcuggaggagca

SEQ ID NO: 2670751 - RNA, 19 nt, Homo sapiens
  misc_RNA (1)...(19): siRNA sense strand
agcagaggccagagagcau

SEQ ID NO: 2670752 - RNA, 19 nt, Homo sapiens
  misc_RNA (1)...(19): siRNA sense strand
aggcugaggcccuuggaga

SEQ ID NO: 2670753 - RNA, 19 nt, Homo sapiens
  misc_RNA (1)...(19): siRNA sense strand
aggccauggaggagggcaa

SEQ ID NO: 2670754 - RNA, 19 nt, Homo sapiens
  misc_RNA (1)...(19): siRNA sense strand
cccaggagcaggagagcaa

SEQ ID NO: 2670755 - RNA, 19 nt, Homo sapiens
  misc_RNA (1)...(19): siRNA sense strand
guggugaggcagagggaca

SEQ ID NO: 2670756 - RNA, 19 nt, Homo sapiens
  misc_RNA (1)...(19): siRNA sense strand
ccacgcaucuuuaggguga

SEQ ID NO: 2670757 - RNA, 19 nt, Homo sapiens
  misc_RNA (1)...(19): siRNA sense strand
gaggaaaaccggaggcuga

SEQ ID NO: 2670758 - RNA, 19 nt, Homo sapiens
  misc_RNA (1)...(19): siRNA sense strand
ugacgcagcugcagggaca

SEQ ID NO: 2670759 - RNA, 19 nt, Homo sapiens
  misc_RNA (1)...(19): siRNA sense strand
gcugaagagggcugagaca

SEQ ID NO: 2670760 - RNA, 19 nt, Homo sapiens
  misc_RNA (1)...(19): siRNA sense strand
ccaugaaaaugcugcacaa

SEQ ID NO: 2670761 - RNA, 19 nt, Homo sapiens
  misc_RNA (1)...(19): siRNA sense strand
gagcuuagccucagcgagu

SEQ ID NO: 2670762 - RNA, 19 nt, Homo sapiens
  misc_RNA (1)...(19): siRNA sense strand
ccuuccaagacgaggagua

SEQ ID NO: 2670763 - RNA, 19 nt, Homo sapiens
  misc_RNA (1)...(19): siRNA sense strand
cgaaacaggcacaggcacu

SEQ ID NO: 2670764 - RNA, 19 nt, Homo sapiens
  misc_RNA (1)...(19): siRNA sense strand
ggaaggaagagcuggccga

SEQ ID NO: 2670765 - RNA, 19 nt, Homo sapiens
  misc_RNA (1)...(19): siRNA sense strand
aguccuugguggaaaccua

SEQ ID NO: 2670766 - RNA, 19 nt, Homo sapiens
  misc_RNA (1)...(19): siRNA sense strand
ccaacuuugauguggauga

SEQ ID NO: 2670767 - RNA, 19 nt, Homo sapiens
  misc_RNA (1)...(19): siRNA sense strand
ccacaaggcauggaggaga

SEQ ID NO: 2670768 - RNA, 19 nt, Homo sapiens
  misc_RNA (1)...(19): siRNA sense strand
gaacauagagguagcaggu

SEQ ID NO: 2670769 - RNA, 19 nt, Homo sapiens
  misc_RNA (1)...(19): siRNA sense strand
uuugagaucuugaagguga

SEQ ID NO: 2670770 - RNA, 19 nt, Homo sapiens
  misc_RNA (1)...(19): siRNA sense strand
ccaccaagauggcagagga

SEQ ID NO: 2670771 - RNA, 19 nt, Homo sapiens
  misc_RNA (1)...(19): siRNA sense strand
cagaaugggugcagaccgu

SEQ ID NO: 2670772 - RNA, 19 nt, Homo sapiens
  misc_RNA (1)...(19): siRNA sense strand
ucaugaaccacgaggacca

SEQ ID NO: 2670773 - RNA, 19 nt, Homo sapiens
  misc_RNA (1)...(19): siRNA sense strand
acacacucaaggaggcuua

SEQ ID NO: 2670774 - RNA, 19 nt, Homo sapiens
  misc_RNA (1)...(19): siRNA sense strand
ugucggaggagcagcagaa

SEQ ID NO: 2670775 - RNA, 19 nt, Homo sapiens
  misc_RNA (1)...(19): siRNA sense strand
ugguggaaaccuacggcaa

SEQ ID NO: 2670776 - RNA, 19 nt, Homo sapiens
  misc_RNA (1)...(19): siRNA sense strand
gggugaaugaugagaaggu

SEQ ID NO: 2670777 - RNA, 19 nt, Homo sapiens
  misc_RNA (1)...(19): siRNA sense strand
aagcagcagcgcagggaga

SEQ ID NO: 2670778 - RNA, 19 nt, Homo sapiens
  misc_RNA (1)...(19): siRNA sense strand
gagaaggacgaguucgaca

SEQ ID NO: 2670779 - RNA, 19 nt, Homo sapiens
  misc_RNA (1)...(19): siRNA sense strand
ccacagggaugucaagcca

SEQ ID NO: 2670780 - RNA, 19 nt, Homo sapiens
  misc_RNA (1)...(19): siRNA sense strand
ccaagauggcagaggagcu

SEQ ID NO: 2670781 - RNA, 19 nt, Homo sapiens
  misc_RNA (1)...(19): siRNA sense strand
guaucaaaggugaaagaac

SEQ ID NO: 2670782 - RNA, 19 nt, Homo sapiens
  misc_RNA (1)...(19): siRNA sense strand
acacagccucugagaccaa

SEQ ID NO: 2670783 - RNA, 19 nt, Homo sapiens
  misc_RNA (1)...(19): siRNA sense strand
ucguaucaaaggugaaaga

SEQ ID NO: 2670784 - RNA, 19 nt, Homo sapiens
  misc_RNA (1)...(19): siRNA sense strand
gguuauguccacagggaug

SEQ ID NO: 2670785 - RNA, 19 nt, Homo sapiens
  misc_RNA (1)...(19): siRNA sense strand
acggcaagaucaugaacca

SEQ ID NO: 2670786 - RNA, 19 nt, Homo sapiens
  misc_RNA (1)...(19): siRNA sense strand
ugacacaggaggccgagaa

SEQ ID NO: 2670787 - RNA, 19 nt, Homo sapiens
  misc_RNA (1)...(19): siRNA sense strand
aagaggaaacccuggacau

SEQ ID NO: 2670788 - RNA, 19 nt, Homo sapiens
  misc_RNA (1)...(19): siRNA sense strand
gcgggaugugcucgugaaa

SEQ ID NO: 2670789 - RNA, 19 nt, Homo sapiens
  misc_RNA (1)...(19): siRNA sense strand
cgggagacggagagcaacu

SEQ ID NO: 2670790 - RNA, 19 nt, Homo sapiens
  misc_RNA (1)...(19): siRNA sense strand
cacaggaggccgagaagca

SEQ ID NO: 2670791 - RNA, 19 nt, Homo sapiens
  misc_RNA (1)...(19): siRNA sense strand
uggacaaggugcugggcua

SEQ ID NO: 2670792 - RNA, 19 nt, Homo sapiens
  misc_RNA (1)...(19): siRNA sense strand
ggucaugcucagaggagaa

SEQ ID NO: 2670793 - RNA, 19 nt, Homo sapiens
  misc_RNA (1)...(19): siRNA sense strand
gaaggaagaugaaagggaa

SEQ ID NO: 2670794 - RNA, 19 nt, Homo sapiens
  misc_RNA (1)...(19): siRNA sense strand
cuaugaagauggagggaag

SEQ ID NO: 2670795 - RNA, 19 nt, Homo sapiens
  misc_RNA (1)...(19): siRNA sense strand
ccgcuacacugcugugaaa

SEQ ID NO: 2670796 - RNA, 19 nt, Homo sapiens
  misc_RNA (1)...(19): siRNA sense strand
cggagaagggagaggaacu

SEQ ID NO: 2670797 - RNA, 19 nt, Homo sapiens
  misc_RNA (1)...(19): siRNA sense strand
ggaccauguaugagacaga

SEQ ID NO: 2670798 - RNA, 19 nt, Homo sapiens
  misc_RNA (1)...(19): siRNA sense strand
uggugaaguugaagcaaaa

SEQ ID NO: 2670799 - RNA, 19 nt, Homo sapiens
  misc_RNA (1)...(19): siRNA sense strand
aguuggagguggcgggaca

SEQ ID NO: 2670800 - RNA, 19 nt, Homo sapiens
  misc_RNA (1)...(19): siRNA sense strand
auggugaaguugaagcaaa

SEQ ID NO: 2670801 - RNA, 19 nt, Homo sapiens
  misc_RNA (1)...(19): siRNA sense strand
acacagugcgagagggcau

SEQ ID NO: 2670802 - RNA, 19 nt, Homo sapiens
  misc_RNA (1)...(19): siRNA sense strand
agacagaggagauggugau

SEQ ID NO: 2670803 - RNA, 19 nt, Homo sapiens
  misc_RNA (1)...(19): siRNA sense strand
cguaaugagcacaggcgau

SEQ ID NO: 2670804 - RNA, 19 nt, Homo sapiens
  misc_RNA (1)...(19): siRNA sense strand
uguaugagacagaggagau

SEQ ID NO: 2670805 - RNA, 19 nt, Homo sapiens
  misc_RNA (1)...(19): siRNA sense strand
cuggagacccugaggagau

SEQ ID NO: 2670806 - RNA, 19 nt, Homo sapiens
  misc_RNA (1)...(19): siRNA sense strand
gcuccaacaaugugguaca

SEQ ID NO: 2670807 - RNA, 19 nt, Homo sapiens
  misc_RNA (1)...(19): siRNA sense strand
acgaguggcugcaggacau

SEQ ID NO: 2670808 - RNA, 19 nt, Homo sapiens
  misc_RNA (1)...(19): siRNA sense strand
gagccugaguacacggaga

SEQ ID NO: 2670809 - RNA, 19 nt, Homo sapiens
  misc_RNA (1)...(19): siRNA sense strand
acgaggugcuggagucaau

SEQ ID NO: 2670810 - RNA, 19 nt, Homo sapiens
  misc_RNA (1)...(19): siRNA sense strand
agaaggaagaugaaaggga

SEQ ID NO: 2670811 - RNA, 19 nt, Homo sapiens
  misc_RNA (1)...(19): siRNA sense strand
gcuuccagcacgaggugua

SEQ ID NO: 2670812 - RNA, 19 nt, Homo sapiens
  misc_RNA (1)...(19): siRNA sense strand
gugaugaggcagugcggga

SEQ ID NO: 2670813 - RNA, 19 nt, Homo sapiens
  misc_RNA (1)...(19): siRNA sense strand
ccuacgacacagugcgaga

SEQ ID NO: 2670814 - RNA, 19 nt, Homo sapiens
  misc_RNA (1)...(19): siRNA sense strand
gagacagaggagaugguga

SEQ ID NO: 2670815 - RNA, 19 nt, Homo sapiens
  misc_RNA (1)...(19): siRNA sense strand
ccgacaagugugaggugga

SEQ ID NO: 2670816 - RNA, 19 nt, Homo sapiens
  misc_RNA (1)...(19): siRNA sense strand
aaagggaagaggagggcga

SEQ ID NO: 2670817 - RNA, 19 nt, Homo sapiens
  misc_RNA (1)...(19): siRNA sense strand
aagaggagggcgauggaga

SEQ ID NO: 2670818 - RNA, 19 nt, Homo sapiens
  misc_RNA (1)...(19): siRNA sense strand
gggagcuggugcuggacau

SEQ ID NO: 2670819 - RNA, 19 nt, Homo sapiens
  misc_RNA (1)...(19): siRNA sense strand
uggcugacaagcugaacaa

SEQ ID NO: 2670820 - RNA, 19 nt, Homo sapiens
  misc_RNA (1)...(19): siRNA sense strand
cgagauuaugucuguguuu

SEQ ID NO: 2670821 - RNA, 19 nt, Homo sapiens
  misc_RNA (1)...(19): siRNA sense strand
gagcaguacaggaaggaug

SEQ ID NO: 2670822 - RNA, 19 nt, Homo sapiens
  misc_RNA (1)...(19): siRNA sense strand
aagggagcaccgagggcaa

SEQ ID NO: 2670823 - RNA, 19 nt, Homo sapiens
  misc_RNA (1)...(19): siRNA sense strand
agguaagcuuccagcacga

SEQ ID NO: 2670824 - RNA, 19 nt, Homo sapiens
  misc_RNA (1)...(19): siRNA sense strand
gccgaagaccuguggcuga

SEQ ID NO: 2670825 - RNA, 19 nt, Homo sapiens
  misc_RNA (1)...(19): siRNA sense strand
auuaaaaccuggaaaggga

SEQ ID NO: 2670826 - RNA, 19 nt, Homo sapiens
  misc_RNA (1)...(19): siRNA sense strand
cuucggaggaucaaaguga

SEQ ID NO: 2670827 - RNA, 19 nt, Homo sapiens
  misc_RNA (1)...(19): siRNA sense strand
uccuagacgugcuggauga

SEQ ID NO: 2670828 - RNA, 19 nt, Homo sapiens
  misc_RNA (1)...(19): siRNA sense strand
gcaaggaggucuacgagag

SEQ ID NO: 2670829 - RNA, 19 nt, Homo sapiens
  misc_RNA (1)...(19): siRNA sense strand
aggagaaggaagaugaaag

SEQ ID NO: 2670830 - RNA, 19 nt, Homo sapiens
  misc_RNA (1)...(19): siRNA sense strand
ccaucaaagcgcugcaugu

SEQ ID NO: 2670831 - RNA, 19 nt, Homo sapiens
  misc_RNA (1)...(19): siRNA sense strand
ugaaauguugccuggauga

SEQ ID NO: 2670832 - RNA, 19 nt, Homo sapiens
  misc_RNA (1)...(19): siRNA sense strand
gagaugaggacguuccaga

SEQ ID NO: 2670833 - RNA, 19 nt, Homo sapiens
  misc_RNA (1)...(19): siRNA sense strand
gggcaaacugagccagcca

SEQ ID NO: 2670834 - RNA, 19 nt, Homo sapiens
  misc_RNA (1)...(19): siRNA sense strand
caacaaggauugcaggaga

SEQ ID NO: 2670835 - RNA, 19 nt, Homo sapiens
  misc_RNA (1)...(19): siRNA sense strand
gagaaauagggaaagaaaa

SEQ ID NO: 2670836 - RNA, 19 nt, Homo sapiens
  misc_RNA (1)...(19): siRNA sense strand
accaggagaaauagggaaa

SEQ ID NO: 2670837 - RNA, 19 nt, Homo sapiens
  misc_RNA (1)...(19): siRNA sense strand
gaagaaagcaguaggagcu

SEQ ID NO: 2670838 - RNA, 19 nt, Homo sapiens
  misc_RNA (1)...(19): siRNA sense strand
agaggagaagagauagaaa

SEQ ID NO: 2670839 - RNA, 19 nt, Homo sapiens
  misc_RNA (1)...(19): siRNA sense strand
gggaagaguaucagaggag

SEQ ID NO: 2670840 - RNA, 19 nt, Homo sapiens
  misc_RNA (1)...(19): siRNA sense strand
ucagaggagaagagauaga

SEQ ID NO: 2670841 - RNA, 19 nt, Homo sapiens
  misc_RNA (1)...(19): siRNA sense strand
aggagaagagauagaaaau

SEQ ID NO: 2670842 - RNA, 19 nt, Homo sapiens
  misc_RNA (1)...(19): siRNA sense strand
cuguggaaaccaggagaaa

SEQ ID NO: 2670843 - RNA, 19 nt, Homo sapiens
  misc_RNA (1)...(19): siRNA sense strand
gaaacaagauucugagugg

SEQ ID NO: 2670844 - RNA, 19 nt, Homo sapiens
  misc_RNA (1)...(19): siRNA sense strand
agccaaggccccagcaaaa

SEQ ID NO: 2670845 - RNA, 19 nt, Homo sapiens
  misc_RNA (1)...(19): siRNA sense strand
ggaaagaagcugagggaag

SEQ ID NO: 2670846 - RNA, 19 nt, Homo sapiens
  misc_RNA (1)...(19): siRNA sense strand
gagcagaggucaaagguga

SEQ ID NO: 2670847 - RNA, 19 nt, Homo sapiens
  misc_RNA (1)...(19): siRNA sense strand
gaacaggagcagaggcaga

SEQ ID NO: 2670848 - RNA, 19 nt, Homo sapiens
  misc_RNA (1)...(19): siRNA sense strand
ccaacaagcugcaggagga

SEQ ID NO: 2670849 - RNA, 19 nt, Homo sapiens
  misc_RNA (1)...(19): siRNA sense strand
ggauaaagguucuggagac

SEQ ID NO: 2670850 - RNA, 19 nt, Homo sapiens
  misc_RNA (1)...(19): siRNA sense strand
gguggaagcuucuagggua

SEQ ID NO: 2670851 - RNA, 19 nt, Homo sapiens
  misc_RNA (1)...(19): siRNA sense strand
ggaggaaggccaaggacga

SEQ ID NO: 2670852 - RNA, 19 nt, Homo sapiens
  misc_RNA (1)...(19): siRNA sense strand
agagauagcgacugggaca

SEQ ID NO: 2670853 - RNA, 19 nt, Homo sapiens
  misc_RNA (1)...(19): siRNA sense strand
cugcaggccaggagagaga

SEQ ID NO: 2670854 - RNA, 19 nt, Homo sapiens
  misc_RNA (1)...(19): siRNA sense strand
ggagauaacagcuagggau

SEQ ID NO: 2670855 - RNA, 19 nt, Homo sapiens
  misc_RNA (1)...(19): siRNA sense strand
aggcuggggucuugggaaa

SEQ ID NO: 2670856 - RNA, 19 nt, Homo sapiens
  misc_RNA (1)...(19): siRNA sense strand
agacugaggugguaggguu

SEQ ID NO: 2670857 - RNA, 19 nt, Homo sapiens
  misc_RNA (1)...(19): siRNA sense strand
ucagagagauagaagcaga

SEQ ID NO: 2670858 - RNA, 19 nt, Homo sapiens
  misc_RNA (1)...(19): siRNA sense strand
gguuggaggugcugggaac

SEQ ID NO: 2670859 - RNA, 19 nt, Homo sapiens
  misc_RNA (1)...(19): siRNA sense strand
cagagaaggcugaagagga

SEQ ID NO: 2670860 - RNA, 19 nt, Homo sapiens
  misc_RNA (1)...(19): siRNA sense strand
guggaugguaccugagaau

SEQ ID NO: 2670861 - RNA, 19 nt, Homo sapiens
  misc_RNA (1)...(19): siRNA sense strand
agacagagguggaagcuuc

SEQ ID NO: 2670862 - RNA, 19 nt, Homo sapiens
  misc_RNA (1)...(19): siRNA sense strand
acaucaagcagaacaacaa

SEQ ID NO: 2670863 - RNA, 19 nt, Homo sapiens
  misc_RNA (1)...(19): siRNA sense strand
cagauaagcuggugguggu

SEQ ID NO: 2670864 - RNA, 19 nt, Homo sapiens
  misc_RNA (1)...(19): siRNA sense strand
cccaggaagcagagaugaa

SEQ ID NO: 2670865 - RNA, 19 nt, Homo sapiens
  misc_RNA (1)...(19): siRNA sense strand
cuacgauagcagagacuga

SEQ ID NO: 2670866 - RNA, 19 nt, Homo sapiens
  misc_RNA (1)...(19): siRNA sense strand
agagauuucaggaguacaa

SEQ ID NO: 2670867 - RNA, 19 nt, Homo sapiens
  misc_RNA (1)...(19): siRNA sense strand
uucagagguuccagagaua

SEQ ID NO: 2670868 - RNA, 19 nt, Homo sapiens
  misc_RNA (1)...(19): siRNA sense strand
caggaggcagagaggcaaa

SEQ ID NO: 2670869 - RNA, 19 nt, Homo sapiens
  misc_RNA (1)...(19): siRNA sense strand
ggcagagacucaaggcuga

SEQ ID NO: 2670870 - RNA, 19 nt, Homo sapiens
  misc_RNA (1)...(19): siRNA sense strand
agaaagaaguugagggguc

SEQ ID NO: 2670871 - RNA, 19 nt, Homo sapiens
  misc_RNA (1)...(19): siRNA sense strand
ggcagcagaaggugcgaua

SEQ ID NO: 2670872 - RNA, 19 nt, Homo sapiens
  misc_RNA (1)...(19): siRNA sense strand
uagcagagacugagguacu

SEQ ID NO: 2670873 - RNA, 19 nt, Homo sapiens
  misc_RNA (1)...(19): siRNA sense strand
gguuagaagcugauacaac

SEQ ID NO: 2670874 - RNA, 19 nt, Homo sapiens
  misc_RNA (1)...(19): siRNA sense strand
aauuauaguuccagaggcu

SEQ ID NO: 2670875 - RNA, 19 nt, Homo sapiens
  misc_RNA (1)...(19): siRNA sense strand
ccgacaagcucaucgucau

SEQ ID NO: 2670876 - RNA, 19 nt, Homo sapiens
  misc_RNA (1)...(19): siRNA sense strand
gcgaugagcuaguccggga

SEQ ID NO: 2670877 - RNA, 19 nt, Homo sapiens
  misc_RNA (1)...(19): siRNA sense strand
agaaagaagcagcaagauc

SEQ ID NO: 2670878 - RNA, 19 nt, Homo sapiens
  misc_RNA (1)...(19): siRNA sense strand
gaucaaggguccuggaguc

SEQ ID NO: 2670879 - RNA, 19 nt, Homo sapiens
  misc_RNA (1)...(19): siRNA sense strand
ugaagguggugcaggcuga

SEQ ID NO: 2670880 - RNA, 19 nt, Homo sapiens
  misc_RNA (1)...(19): siRNA sense strand
agcagagauuucaggagua

SEQ ID NO: 2670881 - RNA, 19 nt, Homo sapiens
  misc_RNA (1)...(19): siRNA sense strand
gggaaaugagaaggggaaa

SEQ ID NO: 2670882 - RNA, 19 nt, Homo sapiens
  misc_RNA (1)...(19): siRNA sense strand
ggaggaggaggaaggccaa

SEQ ID NO: 2670883 - RNA, 19 nt, Homo sapiens
  misc_RNA (1)...(19): siRNA sense strand
gugagggacuggagaccca

SEQ ID NO: 2670884 - RNA, 19 nt, Homo sapiens
  misc_RNA (1)...(19): siRNA sense strand
agagaaggcugaagaggac

SEQ ID NO: 2670885 - RNA, 19 nt, Homo sapiens
  misc_RNA (1)...(19): siRNA sense strand
aggaggaggugcugaucca

SEQ ID NO: 2670886 - RNA, 19 nt, Homo sapiens
  misc_RNA (1)...(19): siRNA sense strand
ggaagcaaaagcagagauu

SEQ ID NO: 2670887 - RNA, 19 nt, Homo sapiens
  misc_RNA (1)...(19): siRNA sense strand
guggaagcuucuaggguac

SEQ ID NO: 2670888 - RNA, 19 nt, Homo sapiens
  misc_RNA (1)...(19): siRNA sense strand
aguacaagggucagagacu

SEQ ID NO: 2670889 - RNA, 19 nt, Homo sapiens
  misc_RNA (1)...(19): siRNA sense strand
aaacagagacugagguggu

SEQ ID NO: 2670890 - RNA, 19 nt, Homo sapiens
  misc_RNA (1)...(19): siRNA sense strand
aggagauagaggugggacu

SEQ ID NO: 2670891 - RNA, 19 nt, Homo sapiens
  misc_RNA (1)...(19): siRNA sense strand
acugaugacccguaagaca

SEQ ID NO: 2670892 - RNA, 19 nt, Homo sapiens
  misc_RNA (1)...(19): siRNA sense strand
aagcagagauuucaggagu

SEQ ID NO: 2670893 - RNA, 19 nt, Homo sapiens
  misc_RNA (1)...(19): siRNA sense strand
ugggaaaugagaaggggaa

SEQ ID NO: 2670894 - RNA, 19 nt, Homo sapiens
  misc_RNA (1)...(19): siRNA sense strand
ggaccuggaaacagagacu

SEQ ID NO: 2670895 - RNA, 19 nt, Homo sapiens
  misc_RNA (1)...(19): siRNA sense strand
gguucugggaauagagacu

SEQ ID NO: 2670896 - RNA, 19 nt, Homo sapiens
  misc_RNA (1)...(19): siRNA sense strand
agggcuagaaucugaggua

SEQ ID NO: 2670897 - RNA, 19 nt, Homo sapiens
  misc_RNA (1)...(19): siRNA sense strand
ucaacaucaagcagaacaa

SEQ ID NO: 2670898 - RNA, 19 nt, Homo sapiens
  misc_RNA (1)...(19): siRNA sense strand
aggaggaggaggaaggcca

SEQ ID NO: 2670899 - RNA, 19 nt, Homo sapiens
  misc_RNA (1)...(19): siRNA sense strand
gggucaggguucccagaga

SEQ ID NO: 2670900 - RNA, 19 nt, Homo sapiens
  misc_RNA (1)...(19): siRNA sense strand
cagaaauuauaguuccaga

SEQ ID NO: 2670901 - RNA, 19 nt, Homo sapiens
  misc_RNA (1)...(19): siRNA sense strand
gaugaagguuuuagagucu

SEQ ID NO: 2670902 - RNA, 19 nt, Homo sapiens
  misc_RNA (1)...(19): siRNA sense strand
gggaaagaagcugagggaa

SEQ ID NO: 2670903 - RNA, 19 nt, Homo sapiens
  misc_RNA (1)...(19): siRNA sense strand
uggaacaggagcagaggca

SEQ ID NO: 2670904 - RNA, 19 nt, Homo sapiens
  misc_RNA (1)...(19): siRNA sense strand
ucauggaggagcaggacuu

SEQ ID NO: 2670905 - RNA, 19 nt, Homo sapiens
  misc_RNA (1)...(19): siRNA sense strand
cuucuaaugcugaggauac

SEQ ID NO: 2670906 - RNA, 19 nt, Homo sapiens
  misc_RNA (1)...(19): siRNA sense strand
gcaaauaccugcagggcaa

SEQ ID NO: 2670907 - RNA, 19 nt, Homo sapiens
  misc_RNA (1)...(19): siRNA sense strand
agaccaagacugaggaaga

SEQ ID NO: 2670908 - RNA, 19 nt, Homo sapiens
  misc_RNA (1)...(19): siRNA sense strand
ggagaugagaacagagaga

SEQ ID NO: 2670909 - RNA, 19 nt, Homo sapiens
  misc_RNA (1)...(19): siRNA sense strand
gugaagaaggagaaagaga

SEQ ID NO: 2670910 - RNA, 19 nt, Homo sapiens
  misc_RNA (1)...(19): siRNA sense strand
ucuaagaaaggaaaggaaa

SEQ ID NO: 2670911 - RNA, 19 nt, Homo sapiens
  misc_RNA (1)...(19): siRNA sense strand
gauuugaagaggagcacaa

SEQ ID NO: 2670912 - RNA, 19 nt, Homo sapiens
  misc_RNA (1)...(19): siRNA sense strand
gaggaagaggaaauggaaa

SEQ ID NO: 2670913 - RNA, 19 nt, Homo sapiens
  misc_RNA (1)...(19): siRNA sense strand
gugccaagcagcagggaga

SEQ ID NO: 2670914 - RNA, 19 nt, Homo sapiens
  misc_RNA (1)...(19): siRNA sense strand
aagaagaaguugcgccgaa

SEQ ID NO: 2670915 - RNA, 19 nt, Homo sapiens
  misc_RNA (1)...(19): siRNA sense strand
cagaagaagaggaagagga

SEQ ID NO: 2670916 - RNA, 19 nt, Homo sapiens
  misc_RNA (1)...(19): siRNA sense strand
aggaagaacagaagaccau

SEQ ID NO: 2670917 - RNA, 19 nt, Homo sapiens
  misc_RNA (1)...(19): siRNA sense strand
aggagaaggaagaacagaa

SEQ ID NO: 2670918 - RNA, 19 nt, Homo sapiens
  misc_RNA (1)...(19): siRNA sense strand
cugaagaguuggagcugga

SEQ ID NO: 2670919 - RNA, 19 nt, Homo sapiens
  misc_RNA (1)...(19): siRNA sense strand
augugaagaaggagaaaga

SEQ ID NO: 2670920 - RNA, 19 nt, Homo sapiens
  misc_RNA (1)...(19): siRNA sense strand
cugaggaagaagagauuga

SEQ ID NO: 2670921 - RNA, 19 nt, Homo sapiens
  misc_RNA (1)...(19): siRNA sense strand
agcaggaggaagaggaaau

SEQ ID NO: 2670922 - RNA, 19 nt, Homo sapiens
  misc_RNA (1)...(19): siRNA sense strand
ggagaagaagccaggagau

SEQ ID NO: 2670923 - RNA, 19 nt, Homo sapiens
  misc_RNA (1)...(19): siRNA sense strand
cccaggagcuucaggccaa

SEQ ID NO: 2670924 - RNA, 19 nt, Homo sapiens
  misc_RNA (1)...(19): siRNA sense strand
aggaagaggaaauggaaac

SEQ ID NO: 2670925 - RNA, 19 nt, Homo sapiens
  misc_RNA (1)...(19): siRNA sense strand
gugaugacgagcaggaaaa

SEQ ID NO: 2670926 - RNA, 19 nt, Homo sapiens
  misc_RNA (1)...(19): siRNA sense strand
agaucugucugaugagcua

SEQ ID NO: 2670927 - RNA, 19 nt, Homo sapiens
  misc_RNA (1)...(19): siRNA sense strand
cggcuaagauggcgacgga

SEQ ID NO: 2670928 - RNA, 19 nt, Homo sapiens
  misc_RNA (1)...(19): siRNA sense strand
gccagagaaacuugacaaa

SEQ ID NO: 2670929 - RNA, 19 nt, Homo sapiens
  misc_RNA (1)...(19): siRNA sense strand
gaagaggagcacaaggaca

SEQ ID NO: 2670930 - RNA, 19 nt, Homo sapiens
  misc_RNA (1)...(19): siRNA sense strand
cugccaaacagaagcaaaa

SEQ ID NO: 2670931 - RNA, 19 nt, Homo sapiens
  misc_RNA (1)...(19): siRNA sense strand
cggccuggaagguggaaaa

SEQ ID NO: 2670932 - RNA, 19 nt, Homo sapiens
  misc_RNA (1)...(19): siRNA sense strand
cgagagaaaguucggccua

SEQ ID NO: 2670933 - RNA, 19 nt, Homo sapiens
  misc_RNA (1)...(19): siRNA sense strand
agaacagagagauggauga

SEQ ID NO: 2670934 - RNA, 19 nt, Homo sapiens
  misc_RNA (1)...(19): siRNA sense strand
cugaaauuuacgagcccaa

SEQ ID NO: 2670935 - RNA, 19 nt, Homo sapiens
  misc_RNA (1)...(19): siRNA sense strand
ucugaugagcuaaggauuu

SEQ ID NO: 2670936 - RNA, 19 nt, Homo sapiens
  misc_RNA (1)...(19): siRNA sense strand
agacugaggaagaagagau

SEQ ID NO: 2670937 - RNA, 19 nt, Homo sapiens
  misc_RNA (1)...(19): siRNA sense strand
caucagugccugcuggaau

SEQ ID NO: 2670938 - RNA, 19 nt, Homo sapiens
  misc_RNA (1)...(19): siRNA sense strand
ggaaccgaaagaagaagaa

SEQ ID NO: 2670939 - RNA, 19 nt, Homo sapiens
  misc_RNA (1)...(19): siRNA sense strand
agauugaguaugugacuga

SEQ ID NO: 2670940 - RNA, 19 nt, Homo sapiens
  misc_RNA (1)...(19): siRNA sense strand
gaugaugugaagaaggaga

SEQ ID NO: 2670941 - RNA, 19 nt, Homo sapiens
  misc_RNA (1)...(19): siRNA sense strand
agugaugacgagcaggaaa

SEQ ID NO: 2670942 - RNA, 19 nt, Homo sapiens
  misc_RNA (1)...(19): siRNA sense strand
ggaagaagaagauugagga

SEQ ID NO: 2670943 - RNA, 19 nt, Homo sapiens
  misc_RNA (1)...(19): siRNA sense strand
cuaagaaaggaaaggaaag

SEQ ID NO: 2670944 - RNA, 19 nt, Homo sapiens
  misc_RNA (1)...(19): siRNA sense strand
caucaaacgcacaggcauc

SEQ ID NO: 2670945 - RNA, 19 nt, Homo sapiens
  misc_RNA (1)...(19): siRNA sense strand
ccagagaagagaacagcca

SEQ ID NO: 2670946 - RNA, 19 nt, Homo sapiens
  misc_RNA (1)...(19): siRNA sense strand
uggccaugacccagaagua

SEQ ID NO: 2670947 - RNA, 19 nt, Homo sapiens
  misc_RNA (1)...(19): siRNA sense strand
ugaaggaacaugagcucuu

SEQ ID NO: 2670948 - RNA, 19 nt, Homo sapiens
  misc_RNA (1)...(19): siRNA sense strand
agaggaucuuugaggcuuu

SEQ ID NO: 2670949 - RNA, 19 nt, Homo sapiens
  misc_RNA (1)...(19): siRNA sense strand
ccaagcuguccaagaagaa

SEQ ID NO: 2670950 - RNA, 19 nt, Homo sapiens
  misc_RNA (1)...(19): siRNA sense strand
aguggaugagacugggaaa

SEQ ID NO: 2670951 - RNA, 19 nt, Homo sapiens
  misc_RNA (1)...(19): siRNA sense strand
gagaagauccugcagcuga

SEQ ID NO: 2670952 - RNA, 19 nt, Homo sapiens
  misc_RNA (1)...(19): siRNA sense strand
cgaggggccacuagagaaa

SEQ ID NO: 2670953 - RNA, 19 nt, Homo sapiens
  misc_RNA (1)...(19): siRNA sense strand
ggcccgaugucguggagau

SEQ ID NO: 2670954 - RNA, 19 nt, Homo sapiens
  misc_RNA (1)...(19): siRNA sense strand
ggaaggaguucgagacacg

SEQ ID NO: 2670955 - RNA, 19 nt, Homo sapiens
  misc_RNA (1)...(19): siRNA sense strand
gagacacgacugaaggaga

SEQ ID NO: 2670956 - RNA, 19 nt, Homo sapiens
  misc_RNA (1)...(19): siRNA sense strand
gaucauucgcugaaggaac

SEQ ID NO: 2670957 - RNA, 19 nt, Homo sapiens
  misc_RNA (1)...(19): siRNA sense strand
ggaagaggaaauggaaaca

SEQ ID NO: 2670958 - RNA, 19 nt, Homo sapiens
  misc_RNA (1)...(19): siRNA sense strand
cucuaagaaaggaaaggaa

SEQ ID NO: 2670959 - RNA, 19 nt, Homo sapiens
  misc_RNA (1)...(19): siRNA sense strand
gcgauggacggaagugaga

SEQ ID NO: 2670960 - RNA, 19 nt, Homo sapiens
  misc_RNA (1)...(19): siRNA sense strand
ggacaaagccgcuccaccu

SEQ ID NO: 2670961 - RNA, 19 nt, Homo sapiens
  misc_RNA (1)...(19): siRNA sense strand
gcguaggaaccgaaagaag

SEQ ID NO: 2670962 - RNA, 19 nt, Homo sapiens
  misc_RNA (1)...(19): siRNA sense strand
gacugaggaagaagagauu

SEQ ID NO: 2670963 - RNA, 19 nt, Homo sapiens
  misc_RNA (1)...(19): siRNA sense strand
aagcguaggaaccgaaaga

SEQ ID NO: 2670964 - RNA, 19 nt, Homo sapiens
  misc_RNA (1)...(19): siRNA sense strand
uugacaaacuggagaacuc

SEQ ID NO: 2670965 - RNA, 19 nt, Homo sapiens
  misc_RNA (1)...(19): siRNA sense strand
ugcucaaccugcugggcaa

SEQ ID NO: 2670966 - RNA, 19 nt, Homo sapiens
  misc_RNA (1)...(19): siRNA sense strand
ggccagaccacaugggagu

SEQ ID NO: 2670967 - RNA, 19 nt, Homo sapiens
  misc_RNA (1)...(19): siRNA sense strand
guacagagguucaaggcaa

SEQ ID NO: 2670968 - RNA, 19 nt, Homo sapiens
  misc_RNA (1)...(19): siRNA sense strand
cggucugagaagauggaaa

SEQ ID NO: 2670969 - RNA, 19 nt, Homo sapiens
  misc_RNA (1)...(19): siRNA sense strand
caggacaagucgaggagca

SEQ ID NO: 2670970 - RNA, 19 nt, Homo sapiens
  misc_RNA (1)...(19): siRNA sense strand
auuucuacguugagaugaa

SEQ ID NO: 2670971 - RNA, 19 nt, Homo sapiens
  misc_RNA (1)...(19): siRNA sense strand
uggccgugucucugggaaa

SEQ ID NO: 2670972 - RNA, 19 nt, Homo sapiens
  misc_RNA (1)...(19): siRNA sense strand
gugucuaagaugugcccaa

SEQ ID NO: 2670973 - RNA, 19 nt, Homo sapiens
  misc_RNA (1)...(19): siRNA sense strand
guugagaugaagugggagu

SEQ ID NO: 2670974 - RNA, 19 nt, Homo sapiens
  misc_RNA (1)...(19): siRNA sense strand
ccacgguuuaugaggaaca

SEQ ID NO: 2670975 - RNA, 19 nt, Homo sapiens
  misc_RNA (1)...(19): siRNA sense strand
aggacaagucgaggagcaa

SEQ ID NO: 2670976 - RNA, 19 nt, Homo sapiens
  misc_RNA (1)...(19): siRNA sense strand
gcuucaucuucaagggcca

SEQ ID NO: 2670977 - RNA, 19 nt, Homo sapiens
  misc_RNA (1)...(19): siRNA sense strand
uugaagugcccaacgggua

SEQ ID NO: 2670978 - RNA, 19 nt, Homo sapiens
  misc_RNA (1)...(19): siRNA sense strand
agcaggaggaggaggacuu

SEQ ID NO: 2670979 - RNA, 19 nt, Homo sapiens
  misc_RNA (1)...(19): siRNA sense strand
aggaggacuuacagcggau

SEQ ID NO: 2670980 - RNA, 19 nt, Homo sapiens
  misc_RNA (1)...(19): siRNA sense strand
ccaacgugggcaaagagaa

SEQ ID NO: 2670981 - RNA, 19 nt, Homo sapiens
  misc_RNA (1)...(19): siRNA sense strand
agguagagguggagggcau

SEQ ID NO: 2670982 - RNA, 19 nt, Homo sapiens
  misc_RNA (1)...(19): siRNA sense strand
gcguaacauggccgagaaa

SEQ ID NO: 2670983 - RNA, 19 nt, Homo sapiens
  misc_RNA (1)...(19): siRNA sense strand
gcugagagcuacugcgcca

SEQ ID NO: 2670984 - RNA, 19 nt, Homo sapiens
  misc_RNA (1)...(19): siRNA sense strand
agguggagggcaugggauu

SEQ ID NO: 2670985 - RNA, 19 nt, Homo sapiens
  misc_RNA (1)...(19): siRNA sense strand
ggaacuugcagcuuggcua

SEQ ID NO: 2670986 - RNA, 19 nt, Homo sapiens
  misc_RNA (1)...(19): siRNA sense strand
gugaagagugcauggagca

SEQ ID NO: 2670987 - RNA, 19 nt, Homo sapiens
  misc_RNA (1)...(19): siRNA sense strand
cagcaaucaugaaggaccu

SEQ ID NO: 2670988 - RNA, 19 nt, Homo sapiens
  misc_RNA (1)...(19): siRNA sense strand
ugaacauauaccugaaaca

SEQ ID NO: 2670989 - RNA, 19 nt, Homo sapiens
  misc_RNA (1)...(19): siRNA sense strand
ggauucaagcccaggccau

SEQ ID NO: 2670990 - RNA, 19 nt, Homo sapiens
  misc_RNA (1)...(19): siRNA sense strand
caucguuggcucugaacau

SEQ ID NO: 2670991 - RNA, 19 nt, Homo sapiens
  misc_RNA (1)...(19): siRNA sense strand
cgcuggagcuacagauuau

SEQ ID NO: 2670992 - RNA, 19 nt, Homo sapiens
  misc_RNA (1)...(19): siRNA sense strand
cacuuacaguacugggaaa

SEQ ID NO: 2670993 - RNA, 19 nt, Homo sapiens
  misc_RNA (1)...(19): siRNA sense strand
uguauuucuuccuggcuaa

SEQ ID NO: 2670994 - RNA, 19 nt, Homo sapiens
  misc_RNA (1)...(19): siRNA sense strand
cagacacgcuggagcuaca

SEQ ID NO: 2670995 - RNA, 19 nt, Homo sapiens
  misc_RNA (1)...(19): siRNA sense strand
augcauccucuuuggguua

SEQ ID NO: 2670996 - RNA, 19 nt, Homo sapiens
  misc_RNA (1)...(19): siRNA sense strand
aguucguccuauugggauu

SEQ ID NO: 2670997 - RNA, 19 nt, Homo sapiens
  misc_RNA (1)...(19): siRNA sense strand
ugacugaguucguccuauu

SEQ ID NO: 2670998 - RNA, 19 nt, Homo sapiens
  misc_RNA (1)...(19): siRNA sense strand
uauacuuaccugagaccua

SEQ ID NO: 2670999 - RNA, 19 nt, Homo sapiens
  misc_RNA (1)...(19): siRNA sense strand
gcgaauguaauuagcagga

SEQ ID NO: 2671000 - RNA, 19 nt, Homo sapiens
  misc_RNA (1)...(19): siRNA sense strand
ccccaaagaugcuggcaga

SEQ ID NO: 2671001 - RNA, 19 nt, Homo sapiens
  misc_RNA (1)...(19): siRNA sense strand
ccuuuguggacguuuguaa

SEQ ID NO: 2671002 - RNA, 19 nt, Homo sapiens
  misc_RNA (1)...(19): siRNA sense strand
agguaaaaccccagaggaa

SEQ ID NO: 2671003 - RNA, 19 nt, Homo sapiens
  misc_RNA (1)...(19): siRNA sense strand
gggaauggcugaacgagca

SEQ ID NO: 2671004 - RNA, 19 nt, Homo sapiens
  misc_RNA (1)...(19): siRNA sense strand
ggacagcgagaaagggaga

SEQ ID NO: 2671005 - RNA, 19 nt, Homo sapiens
  misc_RNA (1)...(19): siRNA sense strand
ggugaugaguguuaaggca

SEQ ID NO: 2671006 - RNA, 19 nt, Homo sapiens
  misc_RNA (1)...(19): siRNA sense strand
guaccaaccugcagcgacu

SEQ ID NO: 2671007 - RNA, 19 nt, Homo sapiens
  misc_RNA (1)...(19): siRNA sense strand
uggauaaugugcuggcuga

SEQ ID NO: 2671008 - RNA, 19 nt, Homo sapiens
  misc_RNA (1)...(19): siRNA sense strand
augccaauuaccuggauaa

SEQ ID NO: 2671009 - RNA, 19 nt, Homo sapiens
  misc_RNA (1)...(19): siRNA sense strand
ccccagaggaagugcuaaa

SEQ ID NO: 2671010 - RNA, 19 nt, Homo sapiens
  misc_RNA (1)...(19): siRNA sense strand
acgacauggaagugggcau

SEQ ID NO: 2671011 - RNA, 19 nt, Homo sapiens
  misc_RNA (1)...(19): siRNA sense strand
cgagaaagggagaaaaguu

SEQ ID NO: 2671012 - RNA, 19 nt, Homo sapiens
  misc_RNA (1)...(19): siRNA sense strand
acaccaugggccagaucaa

SEQ ID NO: 2671013 - RNA, 19 nt, Homo sapiens
  misc_RNA (1)...(19): siRNA sense strand
acagcgagaaagggagaaa

SEQ ID NO: 2671014 - RNA, 19 nt, Homo sapiens
  misc_RNA (1)...(19): siRNA sense strand
cggcauucagggaccggaa

SEQ ID NO: 2671015 - RNA, 19 nt, Homo sapiens
  misc_RNA (1)...(19): siRNA sense strand
ggacaacagaggauggaca

SEQ ID NO: 2671016 - RNA, 19 nt, Homo sapiens
  misc_RNA (1)...(19): siRNA sense strand
agugaaggaccaagcuaua

SEQ ID NO: 2671017 - RNA, 19 nt, Homo sapiens
  misc_RNA (1)...(19): siRNA sense strand
uggugaagaaggugucaaa

SEQ ID NO: 2671018 - RNA, 19 nt, Homo sapiens
  misc_RNA (1)...(19): siRNA sense strand
gggcaaauuaccagaguag

SEQ ID NO: 2671019 - RNA, 19 nt, Homo sapiens
  misc_RNA (1)...(19): siRNA sense strand
agauccacgaggaggguua

SEQ ID NO: 2671020 - RNA, 19 nt, Homo sapiens
  misc_RNA (1)...(19): siRNA sense strand
uuuccaaagucaauggcaa

SEQ ID NO: 2671021 - RNA, 19 nt, Homo sapiens
  misc_RNA (1)...(19): siRNA sense strand
gcacucagcucucagggaa

SEQ ID NO: 2671022 - RNA, 19 nt, Homo sapiens
  misc_RNA (1)...(19): siRNA sense strand
guucaagaagaaagcauau

SEQ ID NO: 2671023 - RNA, 19 nt, Homo sapiens
  misc_RNA (1)...(19): siRNA sense strand
gaagaaagcauaucaggca

SEQ ID NO: 2671024 - RNA, 19 nt, Homo sapiens
  misc_RNA (1)...(19): siRNA sense strand
aagaaagcauaucaggcaa

SEQ ID NO: 2671025 - RNA, 19 nt, Homo sapiens
  misc_RNA (1)...(19): siRNA sense strand
cuggagaugaacucagaaa

SEQ ID NO: 2671026 - RNA, 19 nt, Homo sapiens
  misc_RNA (1)...(19): siRNA sense strand
acuccagggugcagagcau

SEQ ID NO: 2671027 - RNA, 19 nt, Homo sapiens
  misc_RNA (1)...(19): siRNA sense strand
aguucaagaagaaagcaua

SEQ ID NO: 2671028 - RNA, 19 nt, Homo sapiens
  misc_RNA (1)...(19): siRNA sense strand
gcaauugaggaaaggcaga

SEQ ID NO: 2671029 - RNA, 19 nt, Homo sapiens
  misc_RNA (1)...(19): siRNA sense strand
gagaacaaccagacgagga

SEQ ID NO: 2671030 - RNA, 19 nt, Homo sapiens
  misc_RNA (1)...(19): siRNA sense strand
cagaacuccuggugcucaa

SEQ ID NO: 2671031 - RNA, 19 nt, Homo sapiens
  misc_RNA (1)...(19): siRNA sense strand
cugcaggacaacagaggau

SEQ ID NO: 2671032 - RNA, 19 nt, Homo sapiens
  misc_RNA (1)...(19): siRNA sense strand
auaucaggcaauugaggaa

SEQ ID NO: 2671033 - RNA, 19 nt, Homo sapiens
  misc_RNA (1)...(19): siRNA sense strand
ugggacgaguuauggaauu

SEQ ID NO: 2671034 - RNA, 19 nt, Homo sapiens
  misc_RNA (1)...(19): siRNA sense strand
agaaagcauaucaggcaau

SEQ ID NO: 2671035 - RNA, 19 nt, Homo sapiens
  misc_RNA (1)...(19): siRNA sense strand
cugaccgucuagagaacaa

SEQ ID NO: 2671036 - RNA, 19 nt, Homo sapiens
  misc_RNA (1)...(19): siRNA sense strand
aaacagagcaaccuggaga

SEQ ID NO: 2671037 - RNA, 19 nt, Homo sapiens
  misc_RNA (1)...(19): siRNA sense strand
ggggcagaguccagcuuaa

SEQ ID NO: 2671038 - RNA, 19 nt, Homo sapiens
  misc_RNA (1)...(19): siRNA sense strand
acugaguuccagaggauga

SEQ ID NO: 2671039 - RNA, 19 nt, Homo sapiens
  misc_RNA (1)...(19): siRNA sense strand
agaacaaccagacgaggau

SEQ ID NO: 2671040 - RNA, 19 nt, Homo sapiens
  misc_RNA (1)...(19): siRNA sense strand
uugaggaaaggcagaguuu

SEQ ID NO: 2671041 - RNA, 19 nt, Homo sapiens
  misc_RNA (1)...(19): siRNA sense strand
gcaagaaguucguguggga

SEQ ID NO: 2671042 - RNA, 19 nt, Homo sapiens
  misc_RNA (1)...(19): siRNA sense strand
uggagaagcuggaggagga

SEQ ID NO: 2671043 - RNA, 19 nt, Homo sapiens
  misc_RNA (1)...(19): siRNA sense strand
cagcagaacucgcccguga

SEQ ID NO: 2671044 - RNA, 19 nt, Homo sapiens
  misc_RNA (1)...(19): siRNA sense strand
gcgaguaugaggagcccua

SEQ ID NO: 2671045 - RNA, 19 nt, Homo sapiens
  misc_RNA (1)...(19): siRNA sense strand
caccagagcaggaggcaca

SEQ ID NO: 2671046 - RNA, 19 nt, Homo sapiens
  misc_RNA (1)...(19): siRNA sense strand
ucuccaaggcugugagcuu

SEQ ID NO: 2671047 - RNA, 19 nt, Homo sapiens
  misc_RNA (1)...(19): siRNA sense strand
ucuucaacguggagcucaa

SEQ ID NO: 2671048 - RNA, 19 nt, Homo sapiens
  misc_RNA (1)...(19): siRNA sense strand
gcaaagagggccaggagac

SEQ ID NO: 2671049 - RNA, 19 nt, Homo sapiens
  misc_RNA (1)...(19): siRNA sense strand
uggaggaggaggagagugu

SEQ ID NO: 2671050 - RNA, 19 nt, Homo sapiens
  misc_RNA (1)...(19): siRNA sense strand
ccacaggagcuucggcuga

SEQ ID NO: 2671051 - RNA, 19 nt, Homo sapiens
  misc_RNA (1)...(19): siRNA sense strand
gguggagcugaguggcaaa

SEQ ID NO: 2671052 - RNA, 19 nt, Homo sapiens
  misc_RNA (1)...(19): siRNA sense strand
gcuaagcagaagagccuca

SEQ ID NO: 2671053 - RNA, 19 nt, Homo sapiens
  misc_RNA (1)...(19): siRNA sense strand
ugguagaggaugcgccaca

SEQ ID NO: 2671054 - RNA, 19 nt, Homo sapiens
  misc_RNA (1)...(19): siRNA sense strand
gcggguugcucgauggagu

SEQ ID NO: 2671055 - RNA, 19 nt, Homo sapiens
  misc_RNA (1)...(19): siRNA sense strand
ggacacaaggauaagguga

SEQ ID NO: 2671056 - RNA, 19 nt, Homo sapiens
  misc_RNA (1)...(19): siRNA sense strand
ggcgaugggaugagggaga

SEQ ID NO: 2671057 - RNA, 19 nt, Homo sapiens
  misc_RNA (1)...(19): siRNA sense strand
ggacagugaaggaguggga

SEQ ID NO: 2671058 - RNA, 19 nt, Homo sapiens
  misc_RNA (1)...(19): siRNA sense strand
gcuugugagaaguggaaga

SEQ ID NO: 2671059 - RNA, 19 nt, Homo sapiens
  misc_RNA (1)...(19): siRNA sense strand
caaagaagcugcagccgga

SEQ ID NO: 2671060 - RNA, 19 nt, Homo sapiens
  misc_RNA (1)...(19): siRNA sense strand
ccgggaaacuggagagcag

SEQ ID NO: 2671061 - RNA, 19 nt, Homo sapiens
  misc_RNA (1)...(19): siRNA sense strand
gccuauugcuccaggacca

SEQ ID NO: 2671062 - RNA, 19 nt, Homo sapiens
  misc_RNA (1)...(19): siRNA sense strand
gggugaaguggcaggagga

SEQ ID NO: 2671063 - RNA, 19 nt, Homo sapiens
  misc_RNA (1)...(19): siRNA sense strand
ggacagaagcuaugcacug

SEQ ID NO: 2671064 - RNA, 19 nt, Homo sapiens
  misc_RNA (1)...(19): siRNA sense strand
ugaaguggcaggaggagga

SEQ ID NO: 2671065 - RNA, 19 nt, Homo sapiens
  misc_RNA (1)...(19): siRNA sense strand
gagaaguggaagaggcccu

SEQ ID NO: 2671066 - RNA, 19 nt, Homo sapiens
  misc_RNA (1)...(19): siRNA sense strand
agagaugguuaaagggcua

SEQ ID NO: 2671067 - RNA, 19 nt, Homo sapiens
  misc_RNA (1)...(19): siRNA sense strand
guggagaaucugagaaaca

SEQ ID NO: 2671068 - RNA, 19 nt, Homo sapiens
  misc_RNA (1)...(19): siRNA sense strand
ggagaugaggagaggguga

SEQ ID NO: 2671069 - RNA, 19 nt, Homo sapiens
  misc_RNA (1)...(19): siRNA sense strand
gagcaaugcacuugagcuu

SEQ ID NO: 2671070 - RNA, 19 nt, Homo sapiens
  misc_RNA (1)...(19): siRNA sense strand
agaacaaugugaugguaau

SEQ ID NO: 2671071 - RNA, 19 nt, Homo sapiens
  misc_RNA (1)...(19): siRNA sense strand
augaagagcaugugcagaa

SEQ ID NO: 2671072 - RNA, 19 nt, Homo sapiens
  misc_RNA (1)...(19): siRNA sense strand
cuggaaaggcuuaagaaca

SEQ ID NO: 2671073 - RNA, 19 nt, Homo sapiens
  misc_RNA (1)...(19): siRNA sense strand
acaggaaagaauugaggaa

SEQ ID NO: 2671074 - RNA, 19 nt, Homo sapiens
  misc_RNA (1)...(19): siRNA sense strand
ccaaauaccuggaaaggcu

SEQ ID NO: 2671075 - RNA, 19 nt, Homo sapiens
  misc_RNA (1)...(19): siRNA sense strand
gaaaauaccaagucagcaa

SEQ ID NO: 2671076 - RNA, 19 nt, Homo sapiens
  misc_RNA (1)...(19): siRNA sense strand
ggcagaggaccgaggaaau

SEQ ID NO: 2671077 - RNA, 19 nt, Homo sapiens
  misc_RNA (1)...(19): siRNA sense strand
cuaaggaaucuguaaacaa

SEQ ID NO: 2671078 - RNA, 19 nt, Homo sapiens
  misc_RNA (1)...(19): siRNA sense strand
uaguggagaaucugagaaa

SEQ ID NO: 2671079 - RNA, 19 nt, Homo sapiens
  misc_RNA (1)...(19): siRNA sense strand
gguaauugaaacuuggaau

SEQ ID NO: 2671080 - RNA, 19 nt, Homo sapiens
  misc_RNA (1)...(19): siRNA sense strand
cagacaaaugggacaacaa

SEQ ID NO: 2671081 - RNA, 19 nt, Homo sapiens
  misc_RNA (1)...(19): siRNA sense strand
aagaacaaugugaugguaa

SEQ ID NO: 2671082 - RNA, 19 nt, Homo sapiens
  misc_RNA (1)...(19): siRNA sense strand
cucaagaagccuaaggaau

SEQ ID NO: 2671083 - RNA, 19 nt, Homo sapiens
  misc_RNA (1)...(19): siRNA sense strand
ggggagaagcagauuguua

SEQ ID NO: 2671084 - RNA, 19 nt, Homo sapiens
  misc_RNA (1)...(19): siRNA sense strand
auugagaacaggaaagaau

SEQ ID NO: 2671085 - RNA, 19 nt, Homo sapiens
  misc_RNA (1)...(19): siRNA sense strand
gggagaagugauaccacaa

SEQ ID NO: 2671086 - RNA, 19 nt, Homo sapiens
  misc_RNA (1)...(19): siRNA sense strand
gcuacaugccugugauuga

SEQ ID NO: 2671087 - RNA, 19 nt, Homo sapiens
  misc_RNA (1)...(19): siRNA sense strand
gcauaaaggagaugaggag

SEQ ID NO: 2671088 - RNA, 19 nt, Homo sapiens
  misc_RNA (1)...(19): siRNA sense strand
aaagaaugaagaaggaaca

SEQ ID NO: 2671089 - RNA, 19 nt, Homo sapiens
  misc_RNA (1)...(19): siRNA sense strand
gcugaaaggaccugaguuc

SEQ ID NO: 2671090 - RNA, 19 nt, Homo sapiens
  misc_RNA (1)...(19): siRNA sense strand
aggagaggcuagagaucca

SEQ ID NO: 2671091 - RNA, 19 nt, Homo sapiens
  misc_RNA (1)...(19): siRNA sense strand
gaaauggacugauggagca

SEQ ID NO: 2671092 - RNA, 19 nt, Homo sapiens
  misc_RNA (1)...(19): siRNA sense strand
caagaacagcagagggagu

SEQ ID NO: 2671093 - RNA, 19 nt, Homo sapiens
  misc_RNA (1)...(19): siRNA sense strand
gauggugccagaugggaaa

SEQ ID NO: 2671094 - RNA, 19 nt, Homo sapiens
  misc_RNA (1)...(19): siRNA sense strand
cugcaaagaaagcacagaa

SEQ ID NO: 2671095 - RNA, 19 nt, Homo sapiens
  misc_RNA (1)...(19): siRNA sense strand
cacaagaagccaagcauca

SEQ ID NO: 2671096 - RNA, 19 nt, Homo sapiens
  misc_RNA (1)...(19): siRNA sense strand
gaucagauucagagguacu

SEQ ID NO: 2671097 - RNA, 19 nt, Homo sapiens
  misc_RNA (1)...(19): siRNA sense strand
guggcgagcuuauggcaau

SEQ ID NO: 2671098 - RNA, 19 nt, Homo sapiens
  misc_RNA (1)...(19): siRNA sense strand
caaucagacaaaugggaca

SEQ ID NO: 2671099 - RNA, 19 nt, Homo sapiens
  misc_RNA (1)...(19): siRNA sense strand
aggaaagaauugaggaacc

SEQ ID NO: 2671100 - RNA, 19 nt, Homo sapiens
  misc_RNA (1)...(19): siRNA sense strand
uggcagaggaccgaggaaa

SEQ ID NO: 2671101 - RNA, 19 nt, Homo sapiens
  misc_RNA (1)...(19): siRNA sense strand
cuucagaacugcaaccaca

SEQ ID NO: 2671102 - RNA, 19 nt, Homo sapiens
  misc_RNA (1)...(19): siRNA sense strand
gaagaaucugagugagcuu

SEQ ID NO: 2671103 - RNA, 19 nt, Homo sapiens
  misc_RNA (1)...(19): siRNA sense strand
ggagaaucugagaaacaau

SEQ ID NO: 2671104 - RNA, 19 nt, Homo sapiens
  misc_RNA (1)...(19): siRNA sense strand
guaucugcuuggaguagua

SEQ ID NO: 2671105 - RNA, 19 nt, Homo sapiens
  misc_RNA (1)...(19): siRNA sense strand
ucaaauaauggcacuacaa

SEQ ID NO: 2671106 - RNA, 19 nt, Homo sapiens
  misc_RNA (1)...(19): siRNA sense strand
agguacaggcguaguccaa

SEQ ID NO: 2671107 - RNA, 19 nt, Homo sapiens
  misc_RNA (1)...(19): siRNA sense strand
cauguaacuuggugacuca

SEQ ID NO: 2671108 - RNA, 19 nt, Homo sapiens
  misc_RNA (1)...(19): siRNA sense strand
caguauugagucaugcaaa

SEQ ID NO: 2671109 - RNA, 19 nt, Homo sapiens
  misc_RNA (1)...(19): siRNA sense strand
cagcauccuaguagaaaga

SEQ ID NO: 2671110 - RNA, 19 nt, Homo sapiens
  misc_RNA (1)...(19): siRNA sense strand
ggagagggugauuggcuuu

SEQ ID NO: 2671111 - RNA, 19 nt, Homo sapiens
  misc_RNA (1)...(19): siRNA sense strand
caggagagcuguagggacc

SEQ ID NO: 2671112 - RNA, 19 nt, Homo sapiens
  misc_RNA (1)...(19): siRNA sense strand
ggagauagagaacgggugu

SEQ ID NO: 2671113 - RNA, 19 nt, Homo sapiens
  misc_RNA (1)...(19): siRNA sense strand
ucgugaggaugugggaaua

SEQ ID NO: 2671114 - RNA, 19 nt, Homo sapiens
  misc_RNA (1)...(19): siRNA sense strand
gaaggaaugaugaggucca

SEQ ID NO: 2671115 - RNA, 19 nt, Homo sapiens
  misc_RNA (1)...(19): siRNA sense strand
uagaaagagcaaugcacuu

SEQ ID NO: 2671116 - RNA, 19 nt, Homo sapiens
  misc_RNA (1)...(19): siRNA sense strand
cagaaggucgccaaaggaa

SEQ ID NO: 2671117 - RNA, 19 nt, Homo sapiens
  misc_RNA (1)...(19): siRNA sense strand
gagugagcuugaucagauu

SEQ ID NO: 2671118 - RNA, 19 nt, Homo sapiens
  misc_RNA (1)...(19): siRNA sense strand
gugccagaugggaaagauu

SEQ ID NO: 2671119 - RNA, 19 nt, Homo sapiens
  misc_RNA (1)...(19): siRNA sense strand
ugucauucaaagaugcuaa

SEQ ID NO: 2671120 - RNA, 19 nt, Homo sapiens
  misc_RNA (1)...(19): siRNA sense strand
cuuuaauagugaacaccau

SEQ ID NO: 2671121 - RNA, 19 nt, Homo sapiens
  misc_RNA (1)...(19): siRNA sense strand
ggauugagaacaggaaaga

SEQ ID NO: 2671122 - RNA, 19 nt, Homo sapiens
  misc_RNA (1)...(19): siRNA sense strand
gggcuggagcuuugagaac

SEQ ID NO: 2671123 - RNA, 19 nt, Homo sapiens
  misc_RNA (1)...(19): siRNA sense strand
uuaucaaggaucugugcua

SEQ ID NO: 2671124 - RNA, 19 nt, Homo sapiens
  misc_RNA (1)...(19): siRNA sense strand
gcucuacaguuuagugcca

SEQ ID NO: 2671125 - RNA, 19 nt, Homo sapiens
  misc_RNA (1)...(19): siRNA sense strand
acguugaguucacauguaa

SEQ ID NO: 2671126 - RNA, 19 nt, Homo sapiens
  misc_RNA (1)...(19): siRNA sense strand
caggauugagaacaggaaa

SEQ ID NO: 2671127 - RNA, 19 nt, Homo sapiens
  misc_RNA (1)...(19): siRNA sense strand
aaucacagguaguuacuga

SEQ ID NO: 2671128 - RNA, 19 nt, Homo sapiens
  misc_RNA (1)...(19): siRNA sense strand
ugauggugccagaugggaa

SEQ ID NO: 2671129 - RNA, 19 nt, Homo sapiens
  misc_RNA (1)...(19): siRNA sense strand
ggaggagaggcuagagauc

SEQ ID NO: 2671130 - RNA, 19 nt, Homo sapiens
  misc_RNA (1)...(19): siRNA sense strand
agucagcauccuaguagaa

SEQ ID NO: 2671131 - RNA, 19 nt, Homo sapiens
  misc_RNA (1)...(19): siRNA sense strand
uugacagagcggaaaguau

SEQ ID NO: 2671132 - RNA, 19 nt, Homo sapiens
  misc_RNA (1)...(19): siRNA sense strand
acacccaagugguugaaaa

SEQ ID NO: 2671133 - RNA, 19 nt, Homo sapiens
  misc_RNA (1)...(19): siRNA sense strand
agagaugguuaaagggcua

SEQ ID NO: 2671134 - RNA, 19 nt, Homo sapiens
  misc_RNA (1)...(19): siRNA sense strand
guggagaaucugagaaaca

SEQ ID NO: 2671135 - RNA, 19 nt, Homo sapiens
  misc_RNA (1)...(19): siRNA sense strand
ggagaugaggagaggguga

SEQ ID NO: 2671136 - RNA, 19 nt, Homo sapiens
  misc_RNA (1)...(19): siRNA sense strand
gagcaaugcacuugagcuu

SEQ ID NO: 2671137 - RNA, 19 nt, Homo sapiens
  misc_RNA (1)...(19): siRNA sense strand
agaacaaugugaugguaau

SEQ ID NO: 2671138 - RNA, 19 nt, Homo sapiens
  misc_RNA (1)...(19): siRNA sense strand
augaagagcaugugcagaa

SEQ ID NO: 2671139 - RNA, 19 nt, Homo sapiens
  misc_RNA (1)...(19): siRNA sense strand
cuggaaaggcuuaagaaca

SEQ ID NO: 2671140 - RNA, 19 nt, Homo sapiens
  misc_RNA (1)...(19): siRNA sense strand
acaggaaagaauugaggaa

SEQ ID NO: 2671141 - RNA, 19 nt, Homo sapiens
  misc_RNA (1)...(19): siRNA sense strand
ccaaauaccuggaaaggcu

SEQ ID NO: 2671142 - RNA, 19 nt, Homo sapiens
  misc_RNA (1)...(19): siRNA sense strand
gaaaauaccaagucagcaa

SEQ ID NO: 2671143 - RNA, 19 nt, Homo sapiens
  misc_RNA (1)...(19): siRNA sense strand
ggcagaggaccgaggaaau

SEQ ID NO: 2671144 - RNA, 19 nt, Homo sapiens
  misc_RNA (1)...(19): siRNA sense strand
agauaugaccuguaccaaa

SEQ ID NO: 2671145 - RNA, 19 nt, Homo sapiens
  misc_RNA (1)...(19): siRNA sense strand
cuaaggaaucuguaaacaa

SEQ ID NO: 2671146 - RNA, 19 nt, Homo sapiens
  misc_RNA (1)...(19): siRNA sense strand
uaguggagaaucugagaaa

SEQ ID NO: 2671147 - RNA, 19 nt, Homo sapiens
  misc_RNA (1)...(19): siRNA sense strand
gguaauugaaacuuggaau

SEQ ID NO: 2671148 - RNA, 19 nt, Homo sapiens
  misc_RNA (1)...(19): siRNA sense strand
cagacaaaugggacaacaa

SEQ ID NO: 2671149 - RNA, 19 nt, Homo sapiens
  misc_RNA (1)...(19): siRNA sense strand
aagaacaaugugaugguaa

SEQ ID NO: 2671150 - RNA, 19 nt, Homo sapiens
  misc_RNA (1)...(19): siRNA sense strand
cucaagaagccuaaggaau

SEQ ID NO: 2671151 - RNA, 19 nt, Homo sapiens
  misc_RNA (1)...(19): siRNA sense strand
ggggagaagcagauuguua

SEQ ID NO: 2671152 - RNA, 19 nt, Homo sapiens
  misc_RNA (1)...(19): siRNA sense strand
auugagaacaggaaagaau

SEQ ID NO: 2671153 - RNA, 19 nt, Homo sapiens
  misc_RNA (1)...(19): siRNA sense strand
gggagaagugauaccacaa

SEQ ID NO: 2671154 - RNA, 19 nt, Homo sapiens
  misc_RNA (1)...(19): siRNA sense strand
gcuacaugccugugauuga

SEQ ID NO: 2671155 - RNA, 19 nt, Homo sapiens
  misc_RNA (1)...(19): siRNA sense strand
gcauaaaggagaugaggag

SEQ ID NO: 2671156 - RNA, 19 nt, Homo sapiens
  misc_RNA (1)...(19): siRNA sense strand
aaagaaugaagaaggaaca

SEQ ID NO: 2671157 - RNA, 19 nt, Homo sapiens
  misc_RNA (1)...(19): siRNA sense strand
gcugaaaggaccugaguuc

SEQ ID NO: 2671158 - RNA, 19 nt, Homo sapiens
  misc_RNA (1)...(19): siRNA sense strand
aggagaggcuagagaucca

SEQ ID NO: 2671159 - RNA, 19 nt, Homo sapiens
  misc_RNA (1)...(19): siRNA sense strand
gaaauggacugauggagca

SEQ ID NO: 2671160 - RNA, 19 nt, Homo sapiens
  misc_RNA (1)...(19): siRNA sense strand
caagaacagcagagggagu

SEQ ID NO: 2671161 - RNA, 19 nt, Homo sapiens
  misc_RNA (1)...(19): siRNA sense strand
cugcaaagaaagcacagaa

SEQ ID NO: 2671162 - RNA, 19 nt, Homo sapiens
  misc_RNA (1)...(19): siRNA sense strand
gauggugccagaugggaaa

SEQ ID NO: 2671163 - RNA, 19 nt, Homo sapiens
  misc_RNA (1)...(19): siRNA sense strand
cacaagaagccaagcauca

SEQ ID NO: 2671164 - RNA, 19 nt, Homo sapiens
  misc_RNA (1)...(19): siRNA sense strand
gaucagauucagagguacu

SEQ ID NO: 2671165 - RNA, 19 nt, Homo sapiens
  misc_RNA (1)...(19): siRNA sense strand
guggcgagcuuauggcaau

SEQ ID NO: 2671166 - RNA, 19 nt, Homo sapiens
  misc_RNA (1)...(19): siRNA sense strand
aaauaaggcacuaccagaa

SEQ ID NO: 2671167 - RNA, 19 nt, Homo sapiens
  misc_RNA (1)...(19): siRNA sense strand
caaucagacaaaugggaca

SEQ ID NO: 2671168 - RNA, 19 nt, Homo sapiens
  misc_RNA (1)...(19): siRNA sense strand
aggaaagaauugaggaacc

SEQ ID NO: 2671169 - RNA, 19 nt, Homo sapiens
  misc_RNA (1)...(19): siRNA sense strand
uggcagaggaccgaggaaa

SEQ ID NO: 2671170 - RNA, 19 nt, Homo sapiens
  misc_RNA (1)...(19): siRNA sense strand
cuucagaacugcaaccaca

SEQ ID NO: 2671171 - RNA, 19 nt, Homo sapiens
  misc_RNA (1)...(19): siRNA sense strand
gaagaaucugagugagcuu

SEQ ID NO: 2671172 - RNA, 19 nt, Homo sapiens
  misc_RNA (1)...(19): siRNA sense strand
ggagaaucugagaaacaau

SEQ ID NO: 2671173 - RNA, 19 nt, Homo sapiens
  misc_RNA (1)...(19): siRNA sense strand
guaucugcuuggaguagua

SEQ ID NO: 2671174 - RNA, 19 nt, Homo sapiens
  misc_RNA (1)...(19): siRNA sense strand
ucaaauaauggcacuacaa

SEQ ID NO: 2671175 - RNA, 19 nt, Homo sapiens
  misc_RNA (1)...(19): siRNA sense strand
agguacaggcguaguccaa

SEQ ID NO: 2671176 - RNA, 19 nt, Homo sapiens
  misc_RNA (1)...(19): siRNA sense strand
cauguaacuuggugacuca

SEQ ID NO: 2671177 - RNA, 19 nt, Homo sapiens
  misc_RNA (1)...(19): siRNA sense strand
caguauugagucaugcaaa

SEQ ID NO: 2671178 - RNA, 19 nt, Homo sapiens
  misc_RNA (1)...(19): siRNA sense strand
cagcauccuaguagaaaga

SEQ ID NO: 2671179 - RNA, 19 nt, Homo sapiens
  misc_RNA (1)...(19): siRNA sense strand
ggagagggugauuggcuuu

SEQ ID NO: 2671180 - RNA, 19 nt, Homo sapiens
  misc_RNA (1)...(19): siRNA sense strand
caggagagcuguagggacc

SEQ ID NO: 2671181 - RNA, 19 nt, Homo sapiens
  misc_RNA (1)...(19): siRNA sense strand
ggagauagagaacgggugu

SEQ ID NO: 2671182 - RNA, 19 nt, Homo sapiens
  misc_RNA (1)...(19): siRNA sense strand
caaauaaggcacuaccaga

SEQ ID NO: 2671183 - RNA, 19 nt, Homo sapiens
  misc_RNA (1)...(19): siRNA sense strand
ucgugaggaugugggaaua

SEQ ID NO: 2671184 - RNA, 19 nt, Homo sapiens
  misc_RNA (1)...(19): siRNA sense strand
gaaggaaugaugaggucca

SEQ ID NO: 2671185 - RNA, 19 nt, Homo sapiens
  misc_RNA (1)...(19): siRNA sense strand
uagaaagagcaaugcacuu

SEQ ID NO: 2671186 - RNA, 19 nt, Homo sapiens
  misc_RNA (1)...(19): siRNA sense strand
cagaaggucgccaaaggaa

SEQ ID NO: 2671187 - RNA, 19 nt, Homo sapiens
  misc_RNA (1)...(19): siRNA sense strand
aauacuaaguuaaguggca

SEQ ID NO: 2671188 - RNA, 19 nt, Homo sapiens
  misc_RNA (1)...(19): siRNA sense strand
gagugagcuugaucagauu

SEQ ID NO: 2671189 - RNA, 19 nt, Homo sapiens
  misc_RNA (1)...(19): siRNA sense strand
gugccagaugggaaagauu

SEQ ID NO: 2671190 - RNA, 19 nt, Homo sapiens
  misc_RNA (1)...(19): siRNA sense strand
ugucauucaaagaugcuaa

SEQ ID NO: 2671191 - RNA, 19 nt, Homo sapiens
  misc_RNA (1)...(19): siRNA sense strand
cuuuaauagugaacaccau

SEQ ID NO: 2671192 - RNA, 19 nt, Homo sapiens
  misc_RNA (1)...(19): siRNA sense strand
ggauugagaacaggaaaga

SEQ ID NO: 2671193 - RNA, 19 nt, Homo sapiens
  misc_RNA (1)...(19): siRNA sense strand
gggcuggagcuuugagaac

SEQ ID NO: 2671194 - RNA, 19 nt, Homo sapiens
  misc_RNA (1)...(19): siRNA sense strand
aggcacuaccagaacuuaa

SEQ ID NO: 2671195 - RNA, 19 nt, Homo sapiens
  misc_RNA (1)...(19): siRNA sense strand
uuaucaaggaucugugcua

SEQ ID NO: 2671196 - RNA, 19 nt, Homo sapiens
  misc_RNA (1)...(19): siRNA sense strand
gcucuacaguuuagugcca

SEQ ID NO: 2671197 - RNA, 19 nt, Homo sapiens
  misc_RNA (1)...(19): siRNA sense strand
acguugaguucacauguaa

SEQ ID NO: 2671198 - RNA, 19 nt, Homo sapiens
  misc_RNA (1)...(19): siRNA sense strand
caggauugagaacaggaaa

SEQ ID NO: 2671199 - RNA, 19 nt, Homo sapiens
  misc_RNA (1)...(19): siRNA sense strand
acugaaaacaugaggaaaa

SEQ ID NO: 2671200 - RNA, 19 nt, Homo sapiens
  misc_RNA (1)...(19): siRNA sense strand
aggcuaaagaaguaacaaa

SEQ ID NO: 2671201 - RNA, 19 nt, Homo sapiens
  misc_RNA (1)...(19): siRNA sense strand
gggaauaugaugagcaacu

SEQ ID NO: 2671202 - RNA, 19 nt, Homo sapiens
  misc_RNA (1)...(19): siRNA sense strand
cuguuaaggugcugcagaa

SEQ ID NO: 2671203 - RNA, 19 nt, Homo sapiens
  misc_RNA (1)...(19): siRNA sense strand
caguagugagagaagauaa

SEQ ID NO: 2671204 - RNA, 19 nt, Homo sapiens
  misc_RNA (1)...(19): siRNA sense strand
aguagugagagaagauaaa

SEQ ID NO: 2671205 - RNA, 19 nt, Homo sapiens
  misc_RNA (1)...(19): siRNA sense strand
cauacaaauggcugagcua

SEQ ID NO: 2671206 - RNA, 19 nt, Homo sapiens
  misc_RNA (1)...(19): siRNA sense strand
aaacgaaaacagaggcuaa

SEQ ID NO: 2671207 - RNA, 19 nt, Homo sapiens
  misc_RNA (1)...(19): siRNA sense strand
ggcuaaagaaguaacaaau

SEQ ID NO: 2671208 - RNA, 19 nt, Homo sapiens
  misc_RNA (1)...(19): siRNA sense strand
gcaacaaggcaccagggaa

SEQ ID NO: 2671209 - RNA, 19 nt, Homo sapiens
  misc_RNA (1)...(19): siRNA sense strand
aaaagaacccagagaggaa

SEQ ID NO: 2671210 - RNA, 19 nt, Homo sapiens
  misc_RNA (1)...(19): siRNA sense strand
agacaaaggaaacugaaaa

SEQ ID NO: 2671211 - RNA, 19 nt, Homo sapiens
  misc_RNA (1)...(19): siRNA sense strand
guggagaaaacaaaagaaa

SEQ ID NO: 2671212 - RNA, 19 nt, Homo sapiens
  misc_RNA (1)...(19): siRNA sense strand
ggagaaaacaaaagaaaac

SEQ ID NO: 2671213 - RNA, 19 nt, Homo sapiens
  misc_RNA (1)...(19): siRNA sense strand
gcuaaaggacagugggccu

SEQ ID NO: 2671214 - RNA, 19 nt, Homo sapiens
  misc_RNA (1)...(19): siRNA sense strand
acgaaaacgcguacuaaaa

SEQ ID NO: 2671215 - RNA, 19 nt, Homo sapiens
  misc_RNA (1)...(19): siRNA sense strand
ggggaagcgaguagcauua

SEQ ID NO: 2671216 - RNA, 19 nt, Homo sapiens
  misc_RNA (1)...(19): siRNA sense strand
auagugaagaggagcuuaa

SEQ ID NO: 2671217 - RNA, 19 nt, Homo sapiens
  misc_RNA (1)...(19): siRNA sense strand
ccuccaaagcugcugcuaa

SEQ ID NO: 2671218 - RNA, 19 nt, Homo sapiens
  misc_RNA (1)...(19): siRNA sense strand
agguugcaguagugagaga

SEQ ID NO: 2671219 - RNA, 19 nt, Homo sapiens
  misc_RNA (1)...(19): siRNA sense strand
gcacagauagugaagagga

SEQ ID NO: 2671220 - RNA, 19 nt, Homo sapiens
  misc_RNA (1)...(19): siRNA sense strand
aagcagugaaagaagaaaa

SEQ ID NO: 2671221 - RNA, 19 nt, Homo sapiens
  misc_RNA (1)...(19): siRNA sense strand
aagauaaauuggaagcagu

SEQ ID NO: 2671222 - RNA, 19 nt, Homo sapiens
  misc_RNA (1)...(19): siRNA sense strand
ccagcagcccaaaggaauu

SEQ ID NO: 2671223 - RNA, 19 nt, Homo sapiens
  misc_RNA (1)...(19): siRNA sense strand
aaagaggagaagaaucaaa

SEQ ID NO: 2671224 - RNA, 19 nt, Homo sapiens
  misc_RNA (1)...(19): siRNA sense strand
uccagaaagccaugcuaaa

SEQ ID NO: 2671225 - RNA, 19 nt, Homo sapiens
  misc_RNA (1)...(19): siRNA sense strand
acucagaacaagcagugaa

SEQ ID NO: 2671226 - RNA, 19 nt, Homo sapiens
  misc_RNA (1)...(19): siRNA sense strand
aggaauuaugggaauguuu

SEQ ID NO: 2671227 - RNA, 19 nt, Homo sapiens
  misc_RNA (1)...(19): siRNA sense strand
cucagaacaagcagugaaa

SEQ ID NO: 2671228 - RNA, 19 nt, Homo sapiens
  misc_RNA (1)...(19): siRNA sense strand
ugccaaagacugagccuga

SEQ ID NO: 2671229 - RNA, 19 nt, Homo sapiens
  misc_RNA (1)...(19): siRNA sense strand
uagcauuaucugaugauga

SEQ ID NO: 2671230 - RNA, 19 nt, Homo sapiens
  misc_RNA (1)...(19): siRNA sense strand
gcucaaguggagaaaacaa

SEQ ID NO: 2671231 - RNA, 19 nt, Homo sapiens
  misc_RNA (1)...(19): siRNA sense strand
ggacugcugcucugggcaa

SEQ ID NO: 2671232 - RNA, 19 nt, Homo sapiens
  misc_RNA (1)...(19): siRNA sense strand
ugaaaggaaacgaaaagaa

SEQ ID NO: 2671233 - RNA, 19 nt, Homo sapiens
  misc_RNA (1)...(19): siRNA sense strand
acaagcagugaaagaagaa

SEQ ID NO: 2671234 - RNA, 19 nt, Homo sapiens
  misc_RNA (1)...(19): siRNA sense strand
agaaaauucaggagcccaa

SEQ ID NO: 2671235 - RNA, 19 nt, Homo sapiens
  misc_RNA (1)...(19): siRNA sense strand
uggaaaauauagacgaguu

SEQ ID NO: 2671236 - RNA, 19 nt, Homo sapiens
  misc_RNA (1)...(19): siRNA sense strand
aaaccaacaaggaaacgaa

SEQ ID NO: 2671237 - RNA, 19 nt, Homo sapiens
  misc_RNA (1)...(19): siRNA sense strand
cucuugaaccagugccaaa

SEQ ID NO: 2671238 - RNA, 19 nt, Homo sapiens
  misc_RNA (1)...(19): siRNA sense strand
aggaaaggauagagaggga

SEQ ID NO: 2671239 - RNA, 19 nt, Homo sapiens
  misc_RNA (1)...(19): siRNA sense strand
agaaagaggaggaggugga

SEQ ID NO: 2671240 - RNA, 19 nt, Homo sapiens
  misc_RNA (1)...(19): siRNA sense strand
ggaaagcaccagaggggaa

SEQ ID NO: 2671241 - RNA, 19 nt, Homo sapiens
  misc_RNA (1)...(19): siRNA sense strand
gggagaaagaggaggaggu

SEQ ID NO: 2671242 - RNA, 19 nt, Homo sapiens
  misc_RNA (1)...(19): siRNA sense strand
ccgagaaggugguggagcu

SEQ ID NO: 2671243 - RNA, 19 nt, Homo sapiens
  misc_RNA (1)...(19): siRNA sense strand
aggaagaagggaaggagga

SEQ ID NO: 2671244 - RNA, 19 nt, Homo sapiens
  misc_RNA (1)...(19): siRNA sense strand
aggagguggaagaggaaga

SEQ ID NO: 2671245 - RNA, 19 nt, Homo sapiens
  misc_RNA (1)...(19): siRNA sense strand
aggaggagguggaagagga

SEQ ID NO: 2671246 - RNA, 19 nt, Homo sapiens
  misc_RNA (1)...(19): siRNA sense strand
aggaagaagagaaggugga

SEQ ID NO: 2671247 - RNA, 19 nt, Homo sapiens
  misc_RNA (1)...(19): siRNA sense strand
agagggaggaagaagggaa

SEQ ID NO: 2671248 - RNA, 19 nt, Homo sapiens
  misc_RNA (1)...(19): siRNA sense strand
gagaagguggagaaggaga

SEQ ID NO: 2671249 - RNA, 19 nt, Homo sapiens
  misc_RNA (1)...(19): siRNA sense strand
ggggaaggagagagggaga

SEQ ID NO: 2671250 - RNA, 19 nt, Homo sapiens
  misc_RNA (1)...(19): siRNA sense strand
gggaaggagagagggagaa

SEQ ID NO: 2671251 - RNA, 19 nt, Homo sapiens
  misc_RNA (1)...(19): siRNA sense strand
agguggaagaggaagaaga

SEQ ID NO: 2671252 - RNA, 19 nt, Homo sapiens
  misc_RNA (1)...(19): siRNA sense strand
caaugaugacagugugaca

SEQ ID NO: 2671253 - RNA, 19 nt, Homo sapiens
  misc_RNA (1)...(19): siRNA sense strand
agguggagaaggagacaga

SEQ ID NO: 2671254 - RNA, 19 nt, Homo sapiens
  misc_RNA (1)...(19): siRNA sense strand
agacagaaaaggaggcuga

SEQ ID NO: 2671255 - RNA, 19 nt, Homo sapiens
  misc_RNA (1)...(19): siRNA sense strand
guucaaccucuguggaaaa

SEQ ID NO: 2671256 - RNA, 19 nt, Homo sapiens
  misc_RNA (1)...(19): siRNA sense strand
caaggaagcuggugggcag

SEQ ID NO: 2671257 - RNA, 19 nt, Homo sapiens
  misc_RNA (1)...(19): siRNA sense strand
ccuucgaaucugucagcaa

SEQ ID NO: 2671258 - RNA, 19 nt, Homo sapiens
  misc_RNA (1)...(19): siRNA sense strand
cagucaggaggaaaggaua

SEQ ID NO: 2671259 - RNA, 19 nt, Homo sapiens
  misc_RNA (1)...(19): siRNA sense strand
ggaugaggaugaaggcucu

SEQ ID NO: 2671260 - RNA, 19 nt, Homo sapiens
  misc_RNA (1)...(19): siRNA sense strand
aggagagaacggagaagga

SEQ ID NO: 2671261 - RNA, 19 nt, Homo sapiens
  misc_RNA (1)...(19): siRNA sense strand
uugaugaagacaaggauga

SEQ ID NO: 2671262 - RNA, 19 nt, Homo sapiens
  misc_RNA (1)...(19): siRNA sense strand
aauauugacaaguggauca

SEQ ID NO: 2671263 - RNA, 19 nt, Homo sapiens
  misc_RNA (1)...(19): siRNA sense strand
caggaggaaaggauagaga

SEQ ID NO: 2671264 - RNA, 19 nt, Homo sapiens
  misc_RNA (1)...(19): siRNA sense strand
aagggaaggaggagagaac

SEQ ID NO: 2671265 - RNA, 19 nt, Homo sapiens
  misc_RNA (1)...(19): siRNA sense strand
aguucaaccucuguggaaa

SEQ ID NO: 2671266 - RNA, 19 nt, Homo sapiens
  misc_RNA (1)...(19): siRNA sense strand
ccaagucagacacgggcaa

SEQ ID NO: 2671267 - RNA, 19 nt, Homo sapiens
  misc_RNA (1)...(19): siRNA sense strand
ggggaggggcuuugaugaa

SEQ ID NO: 2671268 - RNA, 19 nt, Homo sapiens
  misc_RNA (1)...(19): siRNA sense strand
gaagaagggaaggaggaga

SEQ ID NO: 2671269 - RNA, 19 nt, Homo sapiens
  misc_RNA (1)...(19): siRNA sense strand
agagggagaaagaggagga

SEQ ID NO: 2671270 - RNA, 19 nt, Homo sapiens
  misc_RNA (1)...(19): siRNA sense strand
aguacaugcuccugaccuu

SEQ ID NO: 2671271 - RNA, 19 nt, Homo sapiens
  misc_RNA (1)...(19): siRNA sense strand
gggaggaggaggaaagcac

SEQ ID NO: 2671272 - RNA, 19 nt, Homo sapiens
  misc_RNA (1)...(19): siRNA sense strand
aggaggagagaacggagaa

SEQ ID NO: 2671273 - RNA, 19 nt, Homo sapiens
  misc_RNA (1)...(19): siRNA sense strand
caacagugcugcagggcua

SEQ ID NO: 2671274 - RNA, 19 nt, Homo sapiens
  misc_RNA (1)...(19): siRNA sense strand
ccauugagucgguggauaa

SEQ ID NO: 2671275 - RNA, 19 nt, Homo sapiens
  misc_RNA (1)...(19): siRNA sense strand
ggaugaaggaagugcagua

SEQ ID NO: 2671276 - RNA, 19 nt, Homo sapiens
  misc_RNA (1)...(19): siRNA sense strand
gggcgagagcugugaggaa

SEQ ID NO: 2671277 - RNA, 19 nt, Homo sapiens
  misc_RNA (1)...(19): siRNA sense strand
gcaaagacaaugauggaga

SEQ ID NO: 2671278 - RNA, 19 nt, Homo sapiens
  misc_RNA (1)...(19): siRNA sense strand
caacguuggaugaggagaa

SEQ ID NO: 2671279 - RNA, 19 nt, Homo sapiens
  misc_RNA (1)...(19): siRNA sense strand
ugauggagcugaugggaga

SEQ ID NO: 2671280 - RNA, 19 nt, Homo sapiens
  misc_RNA (1)...(19): siRNA sense strand
cugcaauuguguuugauua

SEQ ID NO: 2671281 - RNA, 19 nt, Homo sapiens
  misc_RNA (1)...(19): siRNA sense strand
agacagagcaguuugggaa

SEQ ID NO: 2671282 - RNA, 19 nt, Homo sapiens
  misc_RNA (1)...(19): siRNA sense strand
gggagaagaggcuggaaga

SEQ ID NO: 2671283 - RNA, 19 nt, Homo sapiens
  misc_RNA (1)...(19): siRNA sense strand
cugcauaucuucagggagu

SEQ ID NO: 2671284 - RNA, 19 nt, Homo sapiens
  misc_RNA (1)...(19): siRNA sense strand
aggauggagccuagacaaa

SEQ ID NO: 2671285 - RNA, 19 nt, Homo sapiens
  misc_RNA (1)...(19): siRNA sense strand
ucucagagcaagugcagaa

SEQ ID NO: 2671286 - RNA, 19 nt, Homo sapiens
  misc_RNA (1)...(19): siRNA sense strand
gugauaucuuugaguacaa

SEQ ID NO: 2671287 - RNA, 19 nt, Homo sapiens
  misc_RNA (1)...(19): siRNA sense strand
guacuuaauggcaggacua

SEQ ID NO: 2671288 - RNA, 19 nt, Homo sapiens
  misc_RNA (1)...(19): siRNA sense strand
caucauaacgacaggcaga

SEQ ID NO: 2671289 - RNA, 19 nt, Homo sapiens
  misc_RNA (1)...(19): siRNA sense strand
gcaucaugucugaaagaau

SEQ ID NO: 2671290 - RNA, 19 nt, Homo sapiens
  misc_RNA (1)...(19): siRNA sense strand
agaagaggcuggaagacau

SEQ ID NO: 2671291 - RNA, 19 nt, Homo sapiens
  misc_RNA (1)...(19): siRNA sense strand
aggcuuugcaggaggaaau

SEQ ID NO: 2671292 - RNA, 19 nt, Homo sapiens
  misc_RNA (1)...(19): siRNA sense strand
gcaagaugaggcugagcua

SEQ ID NO: 2671293 - RNA, 19 nt, Homo sapiens
  misc_RNA (1)...(19): siRNA sense strand
ggggagaucuacauggaua

SEQ ID NO: 2671294 - RNA, 19 nt, Homo sapiens
  misc_RNA (1)...(19): siRNA sense strand
ggaaaggcgcugagugcga

SEQ ID NO: 2671295 - RNA, 19 nt, Homo sapiens
  misc_RNA (1)...(19): siRNA sense strand
gcaugcaggcugugaucaa

SEQ ID NO: 2671296 - RNA, 19 nt, Homo sapiens
  misc_RNA (1)...(19): siRNA sense strand
ucaaugugucucugggaaa

SEQ ID NO: 2671297 - RNA, 19 nt, Homo sapiens
  misc_RNA (1)...(19): siRNA sense strand
gcuacgaccucaaugggaa

SEQ ID NO: 2671298 - RNA, 19 nt, Homo sapiens
  misc_RNA (1)...(19): siRNA sense strand
ugcugagacugaugagaaa

SEQ ID NO: 2671299 - RNA, 19 nt, Homo sapiens
  misc_RNA (1)...(19): siRNA sense strand
ugucauuguugguggcaca

SEQ ID NO: 2671300 - RNA, 19 nt, Homo sapiens
  misc_RNA (1)...(19): siRNA sense strand
ggacaacguuggaugagga

SEQ ID NO: 2671301 - RNA, 19 nt, Homo sapiens
  misc_RNA (1)...(19): siRNA sense strand
cagcaaagacaaugaugga

SEQ ID NO: 2671302 - RNA, 19 nt, Homo sapiens
  misc_RNA (1)...(19): siRNA sense strand
ugucugaaagaauggaaua

SEQ ID NO: 2671303 - RNA, 19 nt, Homo sapiens
  misc_RNA (1)...(19): siRNA sense strand
cuacagaacugcauaucuu

SEQ ID NO: 2671304 - RNA, 19 nt, Homo sapiens
  misc_RNA (1)...(19): siRNA sense strand
caaugaggcuacagaacca

SEQ ID NO: 2671305 - RNA, 19 nt, Homo sapiens
  misc_RNA (1)...(19): siRNA sense strand
gagaagaggcuggaagaca

SEQ ID NO: 2671306 - RNA, 19 nt, Homo sapiens
  misc_RNA (1)...(19): siRNA sense strand
acaaugugguccugcaaau

SEQ ID NO: 2671307 - RNA, 19 nt, Homo sapiens
  misc_RNA (1)...(19): siRNA sense strand
gguuuauccggaagaacaa

SEQ ID NO: 2671308 - RNA, 19 nt, Homo sapiens
  misc_RNA (1)...(19): siRNA sense strand
ccauugaucucuaucgcua

SEQ ID NO: 2671309 - RNA, 19 nt, Homo sapiens
  misc_RNA (1)...(19): siRNA sense strand
gagaaauugaugugggaag

SEQ ID NO: 2671310 - RNA, 19 nt, Homo sapiens
  misc_RNA (1)...(19): siRNA sense strand
gcauuggagcucuggauuu

SEQ ID NO: 2671311 - RNA, 19 nt, Homo sapiens
  misc_RNA (1)...(19): siRNA sense strand
cgguuuauccggaagaaca

SEQ ID NO: 2671312 - RNA, 19 nt, Homo sapiens
  misc_RNA (1)...(19): siRNA sense strand
aggcccagcugaaggaaga

SEQ ID NO: 2671313 - RNA, 19 nt, Homo sapiens
  misc_RNA (1)...(19): siRNA sense strand
ccgaagugauacagacagu

SEQ ID NO: 2671314 - RNA, 19 nt, Homo sapiens
  misc_RNA (1)...(19): siRNA sense strand
gugaggaaguggacugcau

SEQ ID NO: 2671315 - RNA, 19 nt, Homo sapiens
  misc_RNA (1)...(19): siRNA sense strand
caauugaccaggagcucua

SEQ ID NO: 2671316 - RNA, 19 nt, Homo sapiens
  misc_RNA (1)...(19): siRNA sense strand
ucacagacaacaauggcaa

SEQ ID NO: 2671317 - RNA, 19 nt, Homo sapiens
  misc_RNA (1)...(19): siRNA sense strand
cugaaagaauggaauacga

SEQ ID NO: 2671318 - RNA, 19 nt, Homo sapiens
  misc_RNA (1)...(19): siRNA sense strand
gcuucaugacagauguuaa

SEQ ID NO: 2671319 - RNA, 19 nt, Homo sapiens
  misc_RNA (1)...(19): siRNA sense strand
gaacacacgcuacgggaca

SEQ ID NO: 2671320 - RNA, 19 nt, Homo sapiens
  misc_RNA (1)...(19): siRNA sense strand
agacaugaggagaaugaga

SEQ ID NO: 2671321 - RNA, 19 nt, Homo sapiens
  misc_RNA (1)...(19): siRNA sense strand
gcugcagggcuaugaaauu

SEQ ID NO: 2671322 - RNA, 19 nt, Homo sapiens
  misc_RNA (1)...(19): siRNA sense strand
augaaagaccugccugaua

SEQ ID NO: 2671323 - RNA, 19 nt, Homo sapiens
  misc_RNA (1)...(19): siRNA sense strand
cuccaaagaccaagaaguu

SEQ ID NO: 2671324 - RNA, 19 nt, Homo sapiens
  misc_RNA (1)...(19): siRNA sense strand
ccuuggagggagcggaaau

SEQ ID NO: 2671325 - RNA, 19 nt, Homo sapiens
  misc_RNA (1)...(19): siRNA sense strand
ccagaagguguuugggcuu

SEQ ID NO: 2671326 - RNA, 19 nt, Homo sapiens
  misc_RNA (1)...(19): siRNA sense strand
cugauagaguagaggccca

SEQ ID NO: 2671327 - RNA, 19 nt, Homo sapiens
  misc_RNA (1)...(19): siRNA sense strand
gcucacaccacuacgguau

SEQ ID NO: 2671328 - RNA, 19 nt, Homo sapiens
  misc_RNA (1)...(19): siRNA sense strand
gggcaucaugucugaaaga

SEQ ID NO: 2671329 - RNA, 19 nt, Homo sapiens
  misc_RNA (1)...(19): siRNA sense strand
ggaucuucgcugaugggaa

SEQ ID NO: 2671330 - RNA, 19 nt, Homo sapiens
  misc_RNA (1)...(19): siRNA sense strand
aaggaaauguucaggaaag

SEQ ID NO: 2671331 - RNA, 19 nt, Homo sapiens
  misc_RNA (1)...(19): siRNA sense strand
agaucuacauggauaccaa

SEQ ID NO: 2671332 - RNA, 19 nt, Homo sapiens
  misc_RNA (1)...(19): siRNA sense strand
aggcaaaggaaccacagaa

SEQ ID NO: 2671333 - RNA, 19 nt, Homo sapiens
  misc_RNA (1)...(19): siRNA sense strand
ggcaggagaacaugaaaga

SEQ ID NO: 2671334 - RNA, 19 nt, Homo sapiens
  misc_RNA (1)...(19): siRNA sense strand
uggaagacauggaucggau

SEQ ID NO: 2671335 - RNA, 19 nt, Homo sapiens
  misc_RNA (1)...(19): siRNA sense strand
uggucauccugcuggcaua

SEQ ID NO: 2671336 - RNA, 19 nt, Homo sapiens
  misc_RNA (1)...(19): siRNA sense strand
gugcaauggcaacggcaga

SEQ ID NO: 2671337 - RNA, 19 nt, Homo sapiens
  misc_RNA (1)...(19): siRNA sense strand
aagaaugugaacugaaaga

SEQ ID NO: 2671338 - RNA, 19 nt, Homo sapiens
  misc_RNA (1)...(19): siRNA sense strand
cuacacagccagaggcagu

SEQ ID NO: 2671339 - RNA, 19 nt, Homo sapiens
  misc_RNA (1)...(19): siRNA sense strand
gacaacagcuuccggguga

SEQ ID NO: 2671340 - RNA, 19 nt, Homo sapiens
  misc_RNA (1)...(19): siRNA sense strand
aaggaaccacagaaggaaa

SEQ ID NO: 2671341 - RNA, 19 nt, Homo sapiens
  misc_RNA (1)...(19): siRNA sense strand
cugaggaaggcauggucaa

SEQ ID NO: 2671342 - RNA, 19 nt, Homo sapiens
  misc_RNA (1)...(19): siRNA sense strand
ucaagaagcccuccaagua

SEQ ID NO: 2671343 - RNA, 19 nt, Homo sapiens
  misc_RNA (1)...(19): siRNA sense strand
ugagacaugaggagaauga

SEQ ID NO: 2671344 - RNA, 19 nt, Homo sapiens
  misc_RNA (1)...(19): siRNA sense strand
agaacaagccuuuccucaa

SEQ ID NO: 2671345 - RNA, 19 nt, Homo sapiens
  misc_RNA (1)...(19): siRNA sense strand
gcaaagagaugaacaauaa

SEQ ID NO: 2671346 - RNA, 19 nt, Homo sapiens
  misc_RNA (1)...(19): siRNA sense strand
ggaucaagguccuaggauu

SEQ ID NO: 2671347 - RNA, 19 nt, Homo sapiens
  misc_RNA (1)...(19): siRNA sense strand
caacaacagcugacaauaa

SEQ ID NO: 2671348 - RNA, 19 nt, Homo sapiens
  misc_RNA (1)...(19): siRNA sense strand
cagcaaaaguuaaggauca

SEQ ID NO: 2671349 - RNA, 19 nt, Homo sapiens
  misc_RNA (1)...(19): siRNA sense strand
ccaccaagccagacgacaa

SEQ ID NO: 2671350 - RNA, 19 nt, Homo sapiens
  misc_RNA (1)...(19): siRNA sense strand
cgacaaggagcaaagcaaa

SEQ ID NO: 2671351 - RNA, 19 nt, Homo sapiens
  misc_RNA (1)...(19): siRNA sense strand
ccaaagaaucaaaguccua

SEQ ID NO: 2671352 - RNA, 19 nt, Homo sapiens
  misc_RNA (1)...(19): siRNA sense strand
guucagaguuccaaaccaa

SEQ ID NO: 2671353 - RNA, 19 nt, Homo sapiens
  misc_RNA (1)...(19): siRNA sense strand
ggaucaaggcucuguggua

SEQ ID NO: 2671354 - RNA, 19 nt, Homo sapiens
  misc_RNA (1)...(19): siRNA sense strand
cggaauacauugagagcuc

SEQ ID NO: 2671355 - RNA, 19 nt, Homo sapiens
  misc_RNA (1)...(19): siRNA sense strand
cgaggaaggccaaagacaa

SEQ ID NO: 2671356 - RNA, 19 nt, Homo sapiens
  misc_RNA (1)...(19): siRNA sense strand
gggcauggacggacaucaa

SEQ ID NO: 2671357 - RNA, 19 nt, Homo sapiens
  misc_RNA (1)...(19): siRNA sense strand
ggucauugaucgcagaaga

SEQ ID NO: 2671358 - RNA, 19 nt, Homo sapiens
  misc_RNA (1)...(19): siRNA sense strand
cggugaugcggcaggauua

SEQ ID NO: 2671359 - RNA, 19 nt, Homo sapiens
  misc_RNA (1)...(19): siRNA sense strand
ggacaucaagccugugaaa

SEQ ID NO: 2671360 - RNA, 19 nt, Homo sapiens
  misc_RNA (1)...(19): siRNA sense strand
ccacagagccagacaagga

SEQ ID NO: 2671361 - RNA, 19 nt, Homo sapiens
  misc_RNA (1)...(19): siRNA sense strand
cuguaaagaaucaagguuu

SEQ ID NO: 2671362 - RNA, 19 nt, Homo sapiens
  misc_RNA (1)...(19): siRNA sense strand
agcaaagagaugaacaaua

SEQ ID NO: 2671363 - RNA, 19 nt, Homo sapiens
  misc_RNA (1)...(19): siRNA sense strand
agucaaggaucaagauguu

SEQ ID NO: 2671364 - RNA, 19 nt, Homo sapiens
  misc_RNA (1)...(19): siRNA sense strand
cauugaucgcagaagaaua

SEQ ID NO: 2671365 - RNA, 19 nt, Homo sapiens
  misc_RNA (1)...(19): siRNA sense strand
acgacaaggagcaaagcaa

SEQ ID NO: 2671366 - RNA, 19 nt, Homo sapiens
  misc_RNA (1)...(19): siRNA sense strand
aaagcaaagagaugaacaa

SEQ ID NO: 2671367 - RNA, 19 nt, Homo sapiens
  misc_RNA (1)...(19): siRNA sense strand
agacaaggaucaagguucu

SEQ ID NO: 2671368 - RNA, 19 nt, Homo sapiens
  misc_RNA (1)...(19): siRNA sense strand
caguacuaguuaaggauca

SEQ ID NO: 2671369 - RNA, 19 nt, Homo sapiens
  misc_RNA (1)...(19): siRNA sense strand
gccauaagcccacgaggaa

SEQ ID NO: 2671370 - RNA, 19 nt, Homo sapiens
  misc_RNA (1)...(19): siRNA sense strand
aggccaggcugccaagaaa

SEQ ID NO: 2671371 - RNA, 19 nt, Homo sapiens
  misc_RNA (1)...(19): siRNA sense strand
gaucaagguccuaggauuc

SEQ ID NO: 2671372 - RNA, 19 nt, Homo sapiens
  misc_RNA (1)...(19): siRNA sense strand
ccuacagccuccaaagaau

SEQ ID NO: 2671373 - RNA, 19 nt, Homo sapiens
  misc_RNA (1)...(19): siRNA sense strand
cagcaucugucaaggauca

SEQ ID NO: 2671374 - RNA, 19 nt, Homo sapiens
  misc_RNA (1)...(19): siRNA sense strand
ggagcaaagcaaagagaug

SEQ ID NO: 2671375 - RNA, 19 nt, Homo sapiens
  misc_RNA (1)...(19): siRNA sense strand
ccauaaagaaucaagguuc

SEQ ID NO: 2671376 - RNA, 19 nt, Homo sapiens
  misc_RNA (1)...(19): siRNA sense strand
gaaucaaaguccuaugguu

SEQ ID NO: 2671377 - RNA, 19 nt, Homo sapiens
  misc_RNA (1)...(19): siRNA sense strand
ucucugagccuguaaagaa

SEQ ID NO: 2671378 - RNA, 19 nt, Homo sapiens
  misc_RNA (1)...(19): siRNA sense strand
ccacagcacccauaaagaa

SEQ ID NO: 2671379 - RNA, 19 nt, Homo sapiens
  misc_RNA (1)...(19): siRNA sense strand
ucaaaggagaggccagcaa

SEQ ID NO: 2671380 - RNA, 19 nt, Homo sapiens
  misc_RNA (1)...(19): siRNA sense strand
gagcaaagcaaagagauga

SEQ ID NO: 2671381 - RNA, 19 nt, Homo sapiens
  misc_RNA (1)...(19): siRNA sense strand
auaaacuggcugaggcgaa

SEQ ID NO: 2671382 - RNA, 19 nt, Homo sapiens
  misc_RNA (1)...(19): siRNA sense strand
ggucccaggccuucugaaa

SEQ ID NO: 2671383 - RNA, 19 nt, Homo sapiens
  misc_RNA (1)...(19): siRNA sense strand
gaaucaagguuuagugguc

SEQ ID NO: 2671384 - RNA, 19 nt, Homo sapiens
  misc_RNA (1)...(19): siRNA sense strand
guucaugagaccagcuaca

SEQ ID NO: 2671385 - RNA, 19 nt, Homo sapiens
  misc_RNA (1)...(19): siRNA sense strand
gugcucaguucaaaggaga

SEQ ID NO: 2671386 - RNA, 19 nt, Homo sapiens
  misc_RNA (1)...(19): siRNA sense strand
augcaaagguucacgauuc

SEQ ID NO: 2671387 - RNA, 19 nt, Homo sapiens
  misc_RNA (1)...(19): siRNA sense strand
aguuaaggaucaaggcucu

SEQ ID NO: 2671388 - RNA, 19 nt, Homo sapiens
  misc_RNA (1)...(19): siRNA sense strand
uguuguagucccagagcau

SEQ ID NO: 2671389 - RNA, 19 nt, Homo sapiens
  misc_RNA (1)...(19): siRNA sense strand
agcaaagcaaagagaugaa

SEQ ID NO: 2671390 - RNA, 19 nt, Homo sapiens
  misc_RNA (1)...(19): siRNA sense strand
gagccuuuaaagaaugaaa

SEQ ID NO: 2671391 - RNA, 19 nt, Homo sapiens
  misc_RNA (1)...(19): siRNA sense strand
aaagaaucaaggucguaua

SEQ ID NO: 2671392 - RNA, 19 nt, Homo sapiens
  misc_RNA (1)...(19): siRNA sense strand
gaagaaucaaguuccuaua

SEQ ID NO: 2671393 - RNA, 19 nt, Homo sapiens
  misc_RNA (1)...(19): siRNA sense strand
ugaaaccaauaaaggccaa

SEQ ID NO: 2671394 - RNA, 19 nt, Homo sapiens
  misc_RNA (1)...(19): siRNA sense strand
gccaacaacagcugacaau

SEQ ID NO: 2671395 - RNA, 19 nt, Homo sapiens
  misc_RNA (1)...(19): siRNA sense strand
gcucaacccgucagugauu

SEQ ID NO: 2671396 - RNA, 19 nt, Homo sapiens
  misc_RNA (1)...(19): siRNA sense strand
ccgaguccgugaagaauca

SEQ ID NO: 2671397 - RNA, 19 nt, Homo sapiens
  misc_RNA (1)...(19): siRNA sense strand
uaaacuggcugaggcgaaa

SEQ ID NO: 2671398 - RNA, 19 nt, Homo sapiens
  misc_RNA (1)...(19): siRNA sense strand
ucugaaaggucaagguccu

SEQ ID NO: 2671399 - RNA, 19 nt, Homo sapiens
  misc_RNA (1)...(19): siRNA sense strand
cauuaccagucaaggauca

SEQ ID NO: 2671400 - RNA, 19 nt, Homo sapiens
  misc_RNA (1)...(19): siRNA sense strand
ggaucaagguucugugguc

SEQ ID NO: 2671401 - RNA, 19 nt, Homo sapiens
  misc_RNA (1)...(19): siRNA sense strand
aaucaaaguccuaugguuc

SEQ ID NO: 2671402 - RNA, 19 nt, Homo sapiens
  misc_RNA (1)...(19): siRNA sense strand
ggagaggccagcaagccaa

SEQ ID NO: 2671403 - RNA, 19 nt, Homo sapiens
  misc_RNA (1)...(19): siRNA sense strand
ggaucaagauguuguaguc

SEQ ID NO: 2671404 - RNA, 19 nt, Homo sapiens
  misc_RNA (1)...(19): siRNA sense strand
uguaaagaaucaagguccu

SEQ ID NO: 2671405 - RNA, 19 nt, Homo sapiens
  misc_RNA (1)...(19): siRNA sense strand
ggacggacaucaagccugu

SEQ ID NO: 2671406 - RNA, 19 nt, Homo sapiens
  misc_RNA (1)...(19): siRNA sense strand
aggccaagccccaguacaa

SEQ ID NO: 2671407 - RNA, 19 nt, Homo sapiens
  misc_RNA (1)...(19): siRNA sense strand
cccugagccuuuaaagaau

SEQ ID NO: 2671408 - RNA, 19 nt, Homo sapiens
  misc_RNA (1)...(19): siRNA sense strand
acgaggaaggccaaagaca

SEQ ID NO: 2671409 - RNA, 19 nt, Homo sapiens
  misc_RNA (1)...(19): siRNA sense strand
gaggaaggccaaagacaag

SEQ ID NO: 2671410 - RNA, 19 nt, Homo sapiens
  misc_RNA (1)...(19): siRNA sense strand
aaguaagacucaagguccu

SEQ ID NO: 2671411 - RNA, 19 nt, Homo sapiens
  misc_RNA (1)...(19): siRNA sense strand
aguacuaguuaaggaucaa

SEQ ID NO: 2671412 - RNA, 19 nt, Homo sapiens
  misc_RNA (1)...(19): siRNA sense strand
ccgccaacaagcagaucaa

SEQ ID NO: 2671413 - RNA, 19 nt, Homo sapiens
  misc_RNA (1)...(19): siRNA sense strand
aggaguacaccaagcagaa

SEQ ID NO: 2671414 - RNA, 19 nt, Homo sapiens
  misc_RNA (1)...(19): siRNA sense strand
cugaggacuuccaggagau

SEQ ID NO: 2671415 - RNA, 19 nt, Homo sapiens
  misc_RNA (1)...(19): siRNA sense strand
agcgagggcaggaggacua

SEQ ID NO: 2671416 - RNA, 19 nt, Homo sapiens
  misc_RNA (1)...(19): siRNA sense strand
acggcaaaguguuccgcua

SEQ ID NO: 2671417 - RNA, 19 nt, Homo sapiens
  misc_RNA (1)...(19): siRNA sense strand
gagaagaaugccaugcuca

SEQ ID NO: 2671418 - RNA, 19 nt, Homo sapiens
  misc_RNA (1)...(19): siRNA sense strand
ccaccaagagggacagcca

SEQ ID NO: 2671419 - RNA, 19 nt, Homo sapiens
  misc_RNA (1)...(19): siRNA sense strand
aggagaaggaaguggagcu

SEQ ID NO: 2671420 - RNA, 19 nt, Homo sapiens
  misc_RNA (1)...(19): siRNA sense strand
cgaggagcccagagagaac

SEQ ID NO: 2671421 - RNA, 19 nt, Homo sapiens
  misc_RNA (1)...(19): siRNA sense strand
agagggacagccagggcaa

SEQ ID NO: 2671422 - RNA, 19 nt, Homo sapiens
  misc_RNA (1)...(19): siRNA sense strand
acgaggaacaggaggaaau

SEQ ID NO: 2671423 - RNA, 19 nt, Homo sapiens
  misc_RNA (1)...(19): siRNA sense strand
cuggaggagcucaggagaa

SEQ ID NO: 2671424 - RNA, 19 nt, Homo sapiens
  misc_RNA (1)...(19): siRNA sense strand
gggacgaggaacaggagga

SEQ ID NO: 2671425 - RNA, 19 nt, Homo sapiens
  misc_RNA (1)...(19): siRNA sense strand
ucgacugccucaagggcua

SEQ ID NO: 2671426 - RNA, 19 nt, Homo sapiens
  misc_RNA (1)...(19): siRNA sense strand
acgugugggacgaggaaca

SEQ ID NO: 2671427 - RNA, 19 nt, Homo sapiens
  misc_RNA (1)...(19): siRNA sense strand
gauacagggacuaccgcaa

SEQ ID NO: 2671428 - RNA, 19 nt, Homo sapiens
  misc_RNA (1)...(19): siRNA sense strand
ccuucgaggaucugaugaa

SEQ ID NO: 2671429 - RNA, 19 nt, Homo sapiens
  misc_RNA (1)...(19): siRNA sense strand
gagcgagagagcagguuca

SEQ ID NO: 2671430 - RNA, 19 nt, Homo sapiens
  misc_RNA (1)...(19): siRNA sense strand
ccucagucggugaagaaca

SEQ ID NO: 2671431 - RNA, 19 nt, Homo sapiens
  misc_RNA (1)...(19): siRNA sense strand
cgugagaagauguggcaug

SEQ ID NO: 2671432 - RNA, 19 nt, Homo sapiens
  misc_RNA (1)...(19): siRNA sense strand
cgagagagcagguucacca

SEQ ID NO: 2671433 - RNA, 19 nt, Homo sapiens
  misc_RNA (1)...(19): siRNA sense strand
cgcuauagcccaugccuga

SEQ ID NO: 2671434 - RNA, 19 nt, Homo sapiens
  misc_RNA (1)...(19): siRNA sense strand
cggcagagugagagaguga

SEQ ID NO: 2671435 - RNA, 19 nt, Homo sapiens
  misc_RNA (1)...(19): siRNA sense strand
agaagagggaagaagguaa

SEQ ID NO: 2671436 - RNA, 19 nt, Homo sapiens
  misc_RNA (1)...(19): siRNA sense strand
gggaccaucaagagggaaa

SEQ ID NO: 2671437 - RNA, 19 nt, Homo sapiens
  misc_RNA (1)...(19): siRNA sense strand
cgacggaagaggaagacaa

SEQ ID NO: 2671438 - RNA, 19 nt, Homo sapiens
  misc_RNA (1)...(19): siRNA sense strand
acgauaaggagcagaggaa

SEQ ID NO: 2671439 - RNA, 19 nt, Homo sapiens
  misc_RNA (1)...(19): siRNA sense strand
agugagagagugagagcaa

SEQ ID NO: 2671440 - RNA, 19 nt, Homo sapiens
  misc_RNA (1)...(19): siRNA sense strand
gcuaagaggaagaaagcca

SEQ ID NO: 2671441 - RNA, 19 nt, Homo sapiens
  misc_RNA (1)...(19): siRNA sense strand
ugaccaaggaggaguacaa

SEQ ID NO: 2671442 - RNA, 19 nt, Homo sapiens
  misc_RNA (1)...(19): siRNA sense strand
gugaagaagagaagaggga

SEQ ID NO: 2671443 - RNA, 19 nt, Homo sapiens
  misc_RNA (1)...(19): siRNA sense strand
ggaagaaagugccgggaag

SEQ ID NO: 2671444 - RNA, 19 nt, Homo sapiens
  misc_RNA (1)...(19): siRNA sense strand
ccagcaacucggaggagaa

SEQ ID NO: 2671445 - RNA, 19 nt, Homo sapiens
  misc_RNA (1)...(19): siRNA sense strand
gaagaagagaagagggaag

SEQ ID NO: 2671446 - RNA, 19 nt, Homo sapiens
  misc_RNA (1)...(19): siRNA sense strand
agaagagggaggugaccaa

SEQ ID NO: 2671447 - RNA, 19 nt, Homo sapiens
  misc_RNA (1)...(19): siRNA sense strand
gcaagaguggagagaucaa

SEQ ID NO: 2671448 - RNA, 19 nt, Homo sapiens
  misc_RNA (1)...(19): siRNA sense strand
gccaagaggaagagggugu

SEQ ID NO: 2671449 - RNA, 19 nt, Homo sapiens
  misc_RNA (1)...(19): siRNA sense strand
cgacagugacagcgagcau

SEQ ID NO: 2671450 - RNA, 19 nt, Homo sapiens
  misc_RNA (1)...(19): siRNA sense strand
ccuacacgguggagagcau

SEQ ID NO: 2671451 - RNA, 19 nt, Homo sapiens
  misc_RNA (1)...(19): siRNA sense strand
aagaaggccaagaggaaga

SEQ ID NO: 2671452 - RNA, 19 nt, Homo sapiens
  misc_RNA (1)...(19): siRNA sense strand
cggaagaaagugccgggaa

SEQ ID NO: 2671453 - RNA, 19 nt, Homo sapiens
  misc_RNA (1)...(19): siRNA sense strand
aggaggaguacaugaagaa

SEQ ID NO: 2671454 - RNA, 19 nt, Homo sapiens
  misc_RNA (1)...(19): siRNA sense strand
gcacagacggagaagacga

SEQ ID NO: 2671455 - RNA, 19 nt, Homo sapiens
  misc_RNA (1)...(19): siRNA sense strand
cgagaaggagccugggaca

SEQ ID NO: 2671456 - RNA, 19 nt, Homo sapiens
  misc_RNA (1)...(19): siRNA sense strand
aggaggaagaccuggaaga

SEQ ID NO: 2671457 - RNA, 19 nt, Homo sapiens
  misc_RNA (1)...(19): siRNA sense strand
gagcgagcuaagaggaaga

SEQ ID NO: 2671458 - RNA, 19 nt, Homo sapiens
  misc_RNA (1)...(19): siRNA sense strand
aguaggaagaagaagaaaa

SEQ ID NO: 2671459 - RNA, 19 nt, Homo sapiens
  misc_RNA (1)...(19): siRNA sense strand
agcucaauuuggugguaaa

SEQ ID NO: 2671460 - RNA, 19 nt, Homo sapiens
  misc_RNA (1)...(19): siRNA sense strand
gcagagugagagagugaga

SEQ ID NO: 2671461 - RNA, 19 nt, Homo sapiens
  misc_RNA (1)...(19): siRNA sense strand
aaguaagagcucagcgaca

SEQ ID NO: 2671462 - RNA, 19 nt, Homo sapiens
  misc_RNA (1)...(19): siRNA sense strand
aggaagaaagccaaggaca

SEQ ID NO: 2671463 - RNA, 19 nt, Homo sapiens
  misc_RNA (1)...(19): siRNA sense strand
cggccagacaggaaggaga

SEQ ID NO: 2671464 - RNA, 19 nt, Homo sapiens
  misc_RNA (1)...(19): siRNA sense strand
aggugaagcuggccaucaa

SEQ ID NO: 2671465 - RNA, 19 nt, Homo sapiens
  misc_RNA (1)...(19): siRNA sense strand
cauuuguauucgagcucaa

SEQ ID NO: 2671466 - RNA, 19 nt, Homo sapiens
  misc_RNA (1)...(19): siRNA sense strand
ccucugacacggagcgaga

SEQ ID NO: 2671467 - RNA, 19 nt, Homo sapiens
  misc_RNA (1)...(19): siRNA sense strand
cgagaggagcccacagaga

SEQ ID NO: 2671468 - RNA, 19 nt, Homo sapiens
  misc_RNA (1)...(19): siRNA sense strand
guggacaaguacaggcaca

SEQ ID NO: 2671469 - RNA, 19 nt, Homo sapiens
  misc_RNA (1)...(19): siRNA sense strand
cacuaugagaguaggaaga

SEQ ID NO: 2671470 - RNA, 19 nt, Homo sapiens
  misc_RNA (1)...(19): siRNA sense strand
gugcuguggaggaggugaa

SEQ ID NO: 2671471 - RNA, 19 nt, Homo sapiens
  misc_RNA (1)...(19): siRNA sense strand
gagagcgagcuaagaggaa

SEQ ID NO: 2671472 - RNA, 19 nt, Homo sapiens
  misc_RNA (1)...(19): siRNA sense strand
agaguaggaagaagaagaa

SEQ ID NO: 2671473 - RNA, 19 nt, Homo sapiens
  misc_RNA (1)...(19): siRNA sense strand
cgugagaaguggccgcaga

SEQ ID NO: 2671474 - RNA, 19 nt, Homo sapiens
  misc_RNA (1)...(19): siRNA sense strand
gagcaaccgugaaccggaa

SEQ ID NO: 2671475 - RNA, 19 nt, Homo sapiens
  misc_RNA (1)...(19): siRNA sense strand
aggaggaguacaaggacau

SEQ ID NO: 2671476 - RNA, 19 nt, Homo sapiens
  misc_RNA (1)...(19): siRNA sense strand
agaugacggugguggcaga

SEQ ID NO: 2671477 - RNA, 19 nt, Homo sapiens
  misc_RNA (1)...(19): siRNA sense strand
agccagacuuggaggagga

SEQ ID NO: 2671478 - RNA, 19 nt, Homo sapiens
  misc_RNA (1)...(19): siRNA sense strand
uaugagaguaggaagaaga

SEQ ID NO: 2671479 - RNA, 19 nt, Homo sapiens
  misc_RNA (1)...(19): siRNA sense strand
ggaagaggguguccaggga

SEQ ID NO: 2671480 - RNA, 19 nt, Homo sapiens
  misc_RNA (1)...(19): siRNA sense strand
gcagcaggaagaaggccaa

SEQ ID NO: 2671481 - RNA, 19 nt, Homo sapiens
  misc_RNA (1)...(19): siRNA sense strand
cagacaggaaggagagugu

SEQ ID NO: 2671482 - RNA, 19 nt, Homo sapiens
  misc_RNA (1)...(19): siRNA sense strand
aaggaggaguacaaggaca

SEQ ID NO: 2671483 - RNA, 19 nt, Homo sapiens
  misc_RNA (1)...(19): siRNA sense strand
gggcgucugaggaggaaga

SEQ ID NO: 2671484 - RNA, 19 nt, Homo sapiens
  misc_RNA (1)...(19): siRNA sense strand
agacauugcuggagguagc

SEQ ID NO: 2671485 - RNA, 19 nt, Homo sapiens
  misc_RNA (1)...(19): siRNA sense strand
gccaacaucgagugaagaa

SEQ ID NO: 2671486 - RNA, 19 nt, Homo sapiens
  misc_RNA (1)...(19): siRNA sense strand
cauugaugcacgaugaaga

SEQ ID NO: 2671487 - RNA, 19 nt, Homo sapiens
  misc_RNA (1)...(19): siRNA sense strand
gcacaagcaucagcgggaa

SEQ ID NO: 2671488 - RNA, 19 nt, Homo sapiens
  misc_RNA (1)...(19): siRNA sense strand
ccaaccuggugaaggcgua

SEQ ID NO: 2671489 - RNA, 19 nt, Homo sapiens
  misc_RNA (1)...(19): siRNA sense strand
guggagaacaccaaagcga

SEQ ID NO: 2671490 - RNA, 19 nt, Homo sapiens
  misc_RNA (1)...(19): siRNA sense strand
ccaaagcgagcgaggagga

SEQ ID NO: 2671491 - RNA, 19 nt, Homo sapiens
  misc_RNA (1)...(19): siRNA sense strand
aagacaagaagacggaaga

SEQ ID NO: 2671492 - RNA, 19 nt, Homo sapiens
  misc_RNA (1)...(19): siRNA sense strand
aagaaagugccgggaagaa

SEQ ID NO: 2671493 - RNA, 19 nt, Homo sapiens
  misc_RNA (1)...(19): siRNA sense strand
caucgagugaagaagagaa

SEQ ID NO: 2671494 - RNA, 19 nt, Homo sapiens
  misc_RNA (1)...(19): siRNA sense strand
aggaggagccagugccuga

SEQ ID NO: 2671495 - RNA, 19 nt, Homo sapiens
  misc_RNA (1)...(19): siRNA sense strand
aagaagaagaaaaggagau

SEQ ID NO: 2671496 - RNA, 19 nt, Homo sapiens
  misc_RNA (1)...(19): siRNA sense strand
ggcaggugacuuugaagaa

SEQ ID NO: 2671497 - RNA, 19 nt, Homo sapiens
  misc_RNA (1)...(19): siRNA sense strand
aggaagaccuggaagacag

SEQ ID NO: 2671498 - RNA, 19 nt, Homo sapiens
  misc_RNA (1)...(19): siRNA sense strand
cgucaguguugaagccagu

SEQ ID NO: 2671499 - RNA, 19 nt, Homo sapiens
  misc_RNA (1)...(19): siRNA sense strand
ggagagcaucuuugguaca

SEQ ID NO: 2671500 - RNA, 19 nt, Homo sapiens
  misc_RNA (1)...(19): siRNA sense strand
aggaagaaggccaagagga

SEQ ID NO: 2671501 - RNA, 19 nt, Homo sapiens
  misc_RNA (1)...(19): siRNA sense strand
gggaggugaccaaggagga

SEQ ID NO: 2671502 - RNA, 19 nt, Homo sapiens
  misc_RNA (1)...(19): siRNA sense strand
gggagcagcaggaggagau

SEQ ID NO: 2671503 - RNA, 19 nt, Homo sapiens
  misc_RNA (1)...(19): siRNA sense strand
ccaaguacucacacaguca

SEQ ID NO: 2671504 - RNA, 19 nt, Homo sapiens
  misc_RNA (1)...(19): siRNA sense strand
ccaacaacgcucaaggcca

SEQ ID NO: 2671505 - RNA, 19 nt, Homo sapiens
  misc_RNA (1)...(19): siRNA sense strand
gggagcagcaggaggagau

SEQ ID NO: 2671506 - RNA, 19 nt, Homo sapiens
  misc_RNA (1)...(19): siRNA sense strand
ccaaguacucacacaguca

SEQ ID NO: 2671507 - RNA, 19 nt, Homo sapiens
  misc_RNA (1)...(19): siRNA sense strand
ccaaguacucacacaguca

SEQ ID NO: 2671508 - RNA, 19 nt, Homo sapiens
  misc_RNA (1)...(19): siRNA sense strand
ccaaguacucacacaguca

SEQ ID NO: 2671509 - RNA, 19 nt, Homo sapiens
  misc_RNA (1)...(19): siRNA sense strand
ccaacaacgcucaaggcca

SEQ ID NO: 2671510 - RNA, 19 nt, Homo sapiens
  misc_RNA (1)...(19): siRNA sense strand
ccaacaacgcucaaggcca

SEQ ID NO: 2671511 - RNA, 19 nt, Homo sapiens
  misc_RNA (1)...(19): siRNA sense strand
ccaaguacucacacgguca

SEQ ID NO: 2671512 - RNA, 19 nt, Homo sapiens
  misc_RNA (1)...(19): siRNA sense strand
ggacagacuuggagagcag

SEQ ID NO: 2671513 - RNA, 19 nt, Homo sapiens
  misc_RNA (1)...(19): siRNA sense strand
cugaagagcaagugcacca

SEQ ID NO: 2671514 - RNA, 19 nt, Homo sapiens
  misc_RNA (1)...(19): siRNA sense strand
ugcuggaccuggagggcaa

SEQ ID NO: 2671515 - RNA, 19 nt, Homo sapiens
  misc_RNA (1)...(19): siRNA sense strand
gcaacagcguggaggaccu

SEQ ID NO: 2671516 - RNA, 19 nt, Homo sapiens
  misc_RNA (1)...(19): siRNA sense strand
cggugaaggaggccaucaa

SEQ ID NO: 2671517 - RNA, 19 nt, Homo sapiens
  misc_RNA (1)...(19): siRNA sense strand
aggccaucaagaagggcaa

SEQ ID NO: 2671518 - RNA, 19 nt, Homo sapiens
  misc_RNA (1)...(19): siRNA sense strand
caacugaagcugaacggca

SEQ ID NO: 2671519 - RNA, 19 nt, Homo sapiens
  misc_RNA (1)...(19): siRNA sense strand
ucgcugaccuggauggcau

SEQ ID NO: 2671520 - RNA, 19 nt, Homo sapiens
  misc_RNA (1)...(19): siRNA sense strand
ccuggcagucagagggaca

SEQ ID NO: 2671521 - RNA, 19 nt, Homo sapiens
  misc_RNA (1)...(19): siRNA sense strand
gcucugacuuccuggccuu

SEQ ID NO: 2671522 - RNA, 19 nt, Homo sapiens
  misc_RNA (1)...(19): siRNA sense strand
cgauaaaggcaguggacaa

SEQ ID NO: 2671523 - RNA, 19 nt, Homo sapiens
  misc_RNA (1)...(19): siRNA sense strand
gugaagaacaagaguuaua

SEQ ID NO: 2671524 - RNA, 19 nt, Homo sapiens
  misc_RNA (1)...(19): siRNA sense strand
ccgugaagaacaagaguua

SEQ ID NO: 2671525 - RNA, 19 nt, Homo sapiens
  misc_RNA (1)...(19): siRNA sense strand
gguuaacauugaagacaua

SEQ ID NO: 2671526 - RNA, 19 nt, Homo sapiens
  misc_RNA (1)...(19): siRNA sense strand
cagcaaagauauuggcaca

SEQ ID NO: 2671527 - RNA, 19 nt, Homo sapiens
  misc_RNA (1)...(19): siRNA sense strand
ggaacagcauugugagcaa

SEQ ID NO: 2671528 - RNA, 19 nt, Homo sapiens
  misc_RNA (1)...(19): siRNA sense strand
gaacagucacgaugggaaa

SEQ ID NO: 2671529 - RNA, 19 nt, Homo sapiens
  misc_RNA (1)...(19): siRNA sense strand
ccgaaagaagagaggagaa

SEQ ID NO: 2671530 - RNA, 19 nt, Homo sapiens
  misc_RNA (1)...(19): siRNA sense strand
agagaaggguguugggaca

SEQ ID NO: 2671531 - RNA, 19 nt, Homo sapiens
  misc_RNA (1)...(19): siRNA sense strand
ccuugaugguggagggaga

SEQ ID NO: 2671532 - RNA, 19 nt, Homo sapiens
  misc_RNA (1)...(19): siRNA sense strand
acaacaacuucaaggaaau

SEQ ID NO: 2671533 - RNA, 19 nt, Homo sapiens
  misc_RNA (1)...(19): siRNA sense strand
ggaaagugauagagugacu

SEQ ID NO: 2671534 - RNA, 19 nt, Homo sapiens
  misc_RNA (1)...(19): siRNA sense strand
aaacugacauacaggauua

SEQ ID NO: 2671535 - RNA, 19 nt, Homo sapiens
  misc_RNA (1)...(19): siRNA sense strand
ggugacagccauugacaaa

SEQ ID NO: 2671536 - RNA, 19 nt, Homo sapiens
  misc_RNA (1)...(19): siRNA sense strand
gcaaagaagaggauuucaa

SEQ ID NO: 2671537 - RNA, 19 nt, Homo sapiens
  misc_RNA (1)...(19): siRNA sense strand
ugacaaagauaaaggucca

SEQ ID NO: 2671538 - RNA, 19 nt, Homo sapiens
  misc_RNA (1)...(19): siRNA sense strand
ggaaguguaccgagggaau

SEQ ID NO: 2671539 - RNA, 19 nt, Homo sapiens
  misc_RNA (1)...(19): siRNA sense strand
cgaauuacgaugugacaau

SEQ ID NO: 2671540 - RNA, 19 nt, Homo sapiens
  misc_RNA (1)...(19): siRNA sense strand
cugcaaagcaaugggauua

SEQ ID NO: 2671541 - RNA, 19 nt, Homo sapiens
  misc_RNA (1)...(19): siRNA sense strand
cagaaaguggcgaguuaaa

SEQ ID NO: 2671542 - RNA, 19 nt, Homo sapiens
  misc_RNA (1)...(19): siRNA sense strand
ccucagaaccuauauauua

SEQ ID NO: 2671543 - RNA, 19 nt, Homo sapiens
  misc_RNA (1)...(19): siRNA sense strand
ugucaaugcaguuggaaau

SEQ ID NO: 2671544 - RNA, 19 nt, Homo sapiens
  misc_RNA (1)...(19): siRNA sense strand
caucuuaaacccaggaaau

SEQ ID NO: 2671545 - RNA, 19 nt, Homo sapiens
  misc_RNA (1)...(19): siRNA sense strand
cuacaauagcacagauuau

SEQ ID NO: 2671546 - RNA, 19 nt, Homo sapiens
  misc_RNA (1)...(19): siRNA sense strand
uccagaaaguggcgaguua

SEQ ID NO: 2671547 - RNA, 19 nt, Homo sapiens
  misc_RNA (1)...(19): siRNA sense strand
aggcaaaggauucaggcaa

SEQ ID NO: 2671548 - RNA, 19 nt, Homo sapiens
  misc_RNA (1)...(19): siRNA sense strand
caggauuacaaguggaaau

SEQ ID NO: 2671549 - RNA, 19 nt, Homo sapiens
  misc_RNA (1)...(19): siRNA sense strand
ggguuaacauugaagacau

SEQ ID NO: 2671550 - RNA, 19 nt, Homo sapiens
  misc_RNA (1)...(19): siRNA sense strand
ccgaaguagccaugaguga

SEQ ID NO: 2671551 - RNA, 19 nt, Homo sapiens
  misc_RNA (1)...(19): siRNA sense strand
ggauggucacaaaggguaa

SEQ ID NO: 2671552 - RNA, 19 nt, Homo sapiens
  misc_RNA (1)...(19): siRNA sense strand
gauugaagccacagauaga

SEQ ID NO: 2671553 - RNA, 19 nt, Homo sapiens
  misc_RNA (1)...(19): siRNA sense strand
gugcaaaggaugcugauau

SEQ ID NO: 2671554 - RNA, 19 nt, Homo sapiens
  misc_RNA (1)...(19): siRNA sense strand
ggacuaugaauuaugcaaa

SEQ ID NO: 2671555 - RNA, 19 nt, Homo sapiens
  misc_RNA (1)...(19): siRNA sense strand
aguucaugacaguggaaua

SEQ ID NO: 2671556 - RNA, 19 nt, Homo sapiens
  misc_RNA (1)...(19): siRNA sense strand
cagaagauguagacagcca

SEQ ID NO: 2671557 - RNA, 19 nt, Homo sapiens
  misc_RNA (1)...(19): siRNA sense strand
acauagaggaagugcccaa

SEQ ID NO: 2671558 - RNA, 19 nt, Homo sapiens
  misc_RNA (1)...(19): siRNA sense strand
cggugauacugaauaacaa

SEQ ID NO: 2671559 - RNA, 19 nt, Homo sapiens
  misc_RNA (1)...(19): siRNA sense strand
ugauagagugacugaaauu

SEQ ID NO: 2671560 - RNA, 19 nt, Homo sapiens
  misc_RNA (1)...(19): siRNA sense strand
cuaccaagcagaaguaaau

SEQ ID NO: 2671561 - RNA, 19 nt, Homo sapiens
  misc_RNA (1)...(19): siRNA sense strand
cgggaaaugaagaggagga

SEQ ID NO: 2671562 - RNA, 19 nt, Homo sapiens
  misc_RNA (1)...(19): siRNA sense strand
gaaccaggauggagggucu

SEQ ID NO: 2671563 - RNA, 19 nt, Homo sapiens
  misc_RNA (1)...(19): siRNA sense strand
gagugauuguuguggauga

SEQ ID NO: 2671564 - RNA, 19 nt, Homo sapiens
  misc_RNA (1)...(19): siRNA sense strand
ucaaagauggagacauuaa

SEQ ID NO: 2671565 - RNA, 19 nt, Homo sapiens
  misc_RNA (1)...(19): siRNA sense strand
ccauauuacaggaggaaac

SEQ ID NO: 2671566 - RNA, 19 nt, Homo sapiens
  misc_RNA (1)...(19): siRNA sense strand
ugggaacgaacaagggaaa

SEQ ID NO: 2671567 - RNA, 19 nt, Homo sapiens
  misc_RNA (1)...(19): siRNA sense strand
ccacagaucaagacaugua

SEQ ID NO: 2671568 - RNA, 19 nt, Homo sapiens
  misc_RNA (1)...(19): siRNA sense strand
aguugacacuauagagaau

SEQ ID NO: 2671569 - RNA, 19 nt, Homo sapiens
  misc_RNA (1)...(19): siRNA sense strand
agugauagagugacugaaa

SEQ ID NO: 2671570 - RNA, 19 nt, Homo sapiens
  misc_RNA (1)...(19): siRNA sense strand
ugacauaguugguggcaag

SEQ ID NO: 2671571 - RNA, 19 nt, Homo sapiens
  misc_RNA (1)...(19): siRNA sense strand
ggaacauguuuaagaucga

SEQ ID NO: 2671572 - RNA, 19 nt, Homo sapiens
  misc_RNA (1)...(19): siRNA sense strand
cuagaagacaccuggagaa

SEQ ID NO: 2671573 - RNA, 19 nt, Homo sapiens
  misc_RNA (1)...(19): siRNA sense strand
ccauuuggguggugguuca

SEQ ID NO: 2671574 - RNA, 19 nt, Homo sapiens
  misc_RNA (1)...(19): siRNA sense strand
agguauuggauuugaauga

SEQ ID NO: 2671575 - RNA, 19 nt, Homo sapiens
  misc_RNA (1)...(19): siRNA sense strand
ggaaugugaaggagagcga

SEQ ID NO: 2671576 - RNA, 19 nt, Homo sapiens
  misc_RNA (1)...(19): siRNA sense strand
ggaacgaacaagggaaauu

SEQ ID NO: 2671577 - RNA, 19 nt, Homo sapiens
  misc_RNA (1)...(19): siRNA sense strand
ugaagauuguggauggcaa

SEQ ID NO: 2671578 - RNA, 19 nt, Homo sapiens
  misc_RNA (1)...(19): siRNA sense strand
acucggugauacugaauaa

SEQ ID NO: 2671579 - RNA, 19 nt, Homo sapiens
  misc_RNA (1)...(19): siRNA sense strand
caaggaaauuggaucgaga

SEQ ID NO: 2671580 - RNA, 19 nt, Homo sapiens
  misc_RNA (1)...(19): siRNA sense strand
ccacagauagagaugagaa

SEQ ID NO: 2671581 - RNA, 19 nt, Homo sapiens
  misc_RNA (1)...(19): siRNA sense strand
ccaccaauauggcaggaau

SEQ ID NO: 2671582 - RNA, 19 nt, Homo sapiens
  misc_RNA (1)...(19): siRNA sense strand
gaguggagguucugaaagu

SEQ ID NO: 2671583 - RNA, 19 nt, Homo sapiens
  misc_RNA (1)...(19): siRNA sense strand
gacaauggcuggaugguca

SEQ ID NO: 2671584 - RNA, 19 nt, Homo sapiens
  misc_RNA (1)...(19): siRNA sense strand
gcacaaaugcugagaucac

SEQ ID NO: 2671585 - RNA, 19 nt, Homo sapiens
  misc_RNA (1)...(19): siRNA sense strand
uacaacaacuucaaggaaa

SEQ ID NO: 2671586 - RNA, 19 nt, Homo sapiens
  misc_RNA (1)...(19): siRNA sense strand
ccauugaggucuacauuga

SEQ ID NO: 2671587 - RNA, 19 nt, Homo sapiens
  misc_RNA (1)...(19): siRNA sense strand
ccaacugacugcagagagu

SEQ ID NO: 2671588 - RNA, 19 nt, Homo sapiens
  misc_RNA (1)...(19): siRNA sense strand
cagaaaggcuagaccggga

SEQ ID NO: 2671589 - RNA, 19 nt, Homo sapiens
  misc_RNA (1)...(19): siRNA sense strand
uugaagaugugaaugacaa

SEQ ID NO: 2671590 - RNA, 19 nt, Homo sapiens
  misc_RNA (1)...(19): siRNA sense strand
cagaaaucuccuacaguau

SEQ ID NO: 2671591 - RNA, 19 nt, Homo sapiens
  misc_RNA (1)...(19): siRNA sense strand
gguaauacuuggugcuaaa

SEQ ID NO: 2671592 - RNA, 19 nt, Homo sapiens
  misc_RNA (1)...(19): siRNA sense strand
guaaagaagaggaaacaaa

SEQ ID NO: 2671593 - RNA, 19 nt, Homo sapiens
  misc_RNA (1)...(19): siRNA sense strand
guacauaaacagagugaau

SEQ ID NO: 2671594 - RNA, 19 nt, Homo sapiens
  misc_RNA (1)...(19): siRNA sense strand
ucacaaauacaaaggguaa

SEQ ID NO: 2671595 - RNA, 19 nt, Homo sapiens
  misc_RNA (1)...(19): siRNA sense strand
agagaaacuucgagccaaa

SEQ ID NO: 2671596 - RNA, 19 nt, Homo sapiens
  misc_RNA (1)...(19): siRNA sense strand
cuagaaagcagaaaggaaa

SEQ ID NO: 2671597 - RNA, 19 nt, Homo sapiens
  misc_RNA (1)...(19): siRNA sense strand
ucaacuagcugaagugaaa

SEQ ID NO: 2671598 - RNA, 19 nt, Homo sapiens
  misc_RNA (1)...(19): siRNA sense strand
caaucaagcuuuagaauca

SEQ ID NO: 2671599 - RNA, 19 nt, Homo sapiens
  misc_RNA (1)...(19): siRNA sense strand
cuuuaaagacagucagaua

SEQ ID NO: 2671600 - RNA, 19 nt, Homo sapiens
  misc_RNA (1)...(19): siRNA sense strand
gcaugaacuuagugcuaua

SEQ ID NO: 2671601 - RNA, 19 nt, Homo sapiens
  misc_RNA (1)...(19): siRNA sense strand
gcagaaagaaauaaggaau

SEQ ID NO: 2671602 - RNA, 19 nt, Homo sapiens
  misc_RNA (1)...(19): siRNA sense strand
ggaacaacucugaugauaa

SEQ ID NO: 2671603 - RNA, 19 nt, Homo sapiens
  misc_RNA (1)...(19): siRNA sense strand
agacauaaauccacaggua

SEQ ID NO: 2671604 - RNA, 19 nt, Homo sapiens
  misc_RNA (1)...(19): siRNA sense strand
aggagaaacuaaugaaaga

SEQ ID NO: 2671605 - RNA, 19 nt, Homo sapiens
  misc_RNA (1)...(19): siRNA sense strand
cagcaaagagagaacguua

SEQ ID NO: 2671606 - RNA, 19 nt, Homo sapiens
  misc_RNA (1)...(19): siRNA sense strand
ucucacaacuucaggauaa

SEQ ID NO: 2671607 - RNA, 19 nt, Homo sapiens
  misc_RNA (1)...(19): siRNA sense strand
acagauaagagaagacaua

SEQ ID NO: 2671608 - RNA, 19 nt, Homo sapiens
  misc_RNA (1)...(19): siRNA sense strand
gaagagacuuugaaggauu

SEQ ID NO: 2671609 - RNA, 19 nt, Homo sapiens
  misc_RNA (1)...(19): siRNA sense strand
caccagaggcagaaagaaa

SEQ ID NO: 2671610 - RNA, 19 nt, Homo sapiens
  misc_RNA (1)...(19): siRNA sense strand
gucuaaagggcgugaauaa

SEQ ID NO: 2671611 - RNA, 19 nt, Homo sapiens
  misc_RNA (1)...(19): siRNA sense strand
ggaugaaagugaaaugauu

SEQ ID NO: 2671612 - RNA, 19 nt, Homo sapiens
  misc_RNA (1)...(19): siRNA sense strand
cucaauaagccgagaacaa

SEQ ID NO: 2671613 - RNA, 19 nt, Homo sapiens
  misc_RNA (1)...(19): siRNA sense strand
aguuagaccuacagaagaa

SEQ ID NO: 2671614 - RNA, 19 nt, Homo sapiens
  misc_RNA (1)...(19): siRNA sense strand
caacagaagccucagauua

SEQ ID NO: 2671615 - RNA, 19 nt, Homo sapiens
  misc_RNA (1)...(19): siRNA sense strand
gaaggaagauuaugaaaga

SEQ ID NO: 2671616 - RNA, 19 nt, Homo sapiens
  misc_RNA (1)...(19): siRNA sense strand
ccacugugcuacuggauua

SEQ ID NO: 2671617 - RNA, 19 nt, Homo sapiens
  misc_RNA (1)...(19): siRNA sense strand
agaaagagauaucgccuua

SEQ ID NO: 2671618 - RNA, 19 nt, Homo sapiens
  misc_RNA (1)...(19): siRNA sense strand
ggaaacaacagaaacauua

SEQ ID NO: 2671619 - RNA, 19 nt, Homo sapiens
  misc_RNA (1)...(19): siRNA sense strand
ccaaaggggucuaagguua

SEQ ID NO: 2671620 - RNA, 19 nt, Homo sapiens
  misc_RNA (1)...(19): siRNA sense strand
ccauacaaacgcagugaaa

SEQ ID NO: 2671621 - RNA, 19 nt, Homo sapiens
  misc_RNA (1)...(19): siRNA sense strand
uauaaaagcucgaaaggaa

SEQ ID NO: 2671622 - RNA, 19 nt, Homo sapiens
  misc_RNA (1)...(19): siRNA sense strand
uugacuaaacagagggaua

SEQ ID NO: 2671623 - RNA, 19 nt, Homo sapiens
  misc_RNA (1)...(19): siRNA sense strand
caagcaaaguggugagcau

SEQ ID NO: 2671624 - RNA, 19 nt, Homo sapiens
  misc_RNA (1)...(19): siRNA sense strand
gaagauagucauaggcaga

SEQ ID NO: 2671625 - RNA, 19 nt, Homo sapiens
  misc_RNA (1)...(19): siRNA sense strand
ccagaaaacccaagaaaau

SEQ ID NO: 2671626 - RNA, 19 nt, Homo sapiens
  misc_RNA (1)...(19): siRNA sense strand
gcaguuaagcugaaggaau

SEQ ID NO: 2671627 - RNA, 19 nt, Homo sapiens
  misc_RNA (1)...(19): siRNA sense strand
ggagaauucaggagcuuua

SEQ ID NO: 2671628 - RNA, 19 nt, Homo sapiens
  misc_RNA (1)...(19): siRNA sense strand
uggaaauagaagagcagaa

SEQ ID NO: 2671629 - RNA, 19 nt, Homo sapiens
  misc_RNA (1)...(19): siRNA sense strand
acaagaacaucuaaggcaa

SEQ ID NO: 2671630 - RNA, 19 nt, Homo sapiens
  misc_RNA (1)...(19): siRNA sense strand
gagaaaacccagaaagaau

SEQ ID NO: 2671631 - RNA, 19 nt, Homo sapiens
  misc_RNA (1)...(19): siRNA sense strand
cugugaagccagaugauaa

SEQ ID NO: 2671632 - RNA, 19 nt, Homo sapiens
  misc_RNA (1)...(19): siRNA sense strand
gaauaaagucagagcaucu

SEQ ID NO: 2671633 - RNA, 19 nt, Homo sapiens
  misc_RNA (1)...(19): siRNA sense strand
cgagaacaagaaagagaua

SEQ ID NO: 2671634 - RNA, 19 nt, Homo sapiens
  misc_RNA (1)...(19): siRNA sense strand
aagauaauuuggaggaaca

SEQ ID NO: 2671635 - RNA, 19 nt, Homo sapiens
  misc_RNA (1)...(19): siRNA sense strand
cagaaacagauaauggaaa

SEQ ID NO: 2671636 - RNA, 19 nt, Homo sapiens
  misc_RNA (1)...(19): siRNA sense strand
ugacaauacuccaagaaca

SEQ ID NO: 2671637 - RNA, 19 nt, Homo sapiens
  misc_RNA (1)...(19): siRNA sense strand
gcauaaagaagccuugaaa

SEQ ID NO: 2671638 - RNA, 19 nt, Homo sapiens
  misc_RNA (1)...(19): siRNA sense strand
acaagaagcucgggaagaa

SEQ ID NO: 2671639 - RNA, 19 nt, Homo sapiens
  misc_RNA (1)...(19): siRNA sense strand
acuagaaagcagaaaggaa

SEQ ID NO: 2671640 - RNA, 19 nt, Homo sapiens
  misc_RNA (1)...(19): siRNA sense strand
cagaaagugaauuggagaa

SEQ ID NO: 2671641 - RNA, 19 nt, Homo sapiens
  misc_RNA (1)...(19): siRNA sense strand
cacaagaccuagcaggaaa

SEQ ID NO: 2671642 - RNA, 19 nt, Homo sapiens
  misc_RNA (1)...(19): siRNA sense strand
gugaauaaagucagagcau

SEQ ID NO: 2671643 - RNA, 19 nt, Homo sapiens
  misc_RNA (1)...(19): siRNA sense strand
acaagaagcuuaugcccaa

SEQ ID NO: 2671644 - RNA, 19 nt, Homo sapiens
  misc_RNA (1)...(19): siRNA sense strand
gaagacuggcagagagaau

SEQ ID NO: 2671645 - RNA, 19 nt, Homo sapiens
  misc_RNA (1)...(19): siRNA sense strand
gggaagugauguauucuua

SEQ ID NO: 2671646 - RNA, 19 nt, Homo sapiens
  misc_RNA (1)...(19): siRNA sense strand
gaacaacucugaugauaau

SEQ ID NO: 2671647 - RNA, 19 nt, Homo sapiens
  misc_RNA (1)...(19): siRNA sense strand
gugaauagagagacagaca

SEQ ID NO: 2671648 - RNA, 19 nt, Homo sapiens
  misc_RNA (1)...(19): siRNA sense strand
gaucaaggucagagacuca

SEQ ID NO: 2671649 - RNA, 19 nt, Homo sapiens
  misc_RNA (1)...(19): siRNA sense strand
guauaucaaucaagaguga

SEQ ID NO: 2671650 - RNA, 19 nt, Homo sapiens
  misc_RNA (1)...(19): siRNA sense strand
gggcucagcuggaagaaga

SEQ ID NO: 2671651 - RNA, 19 nt, Homo sapiens
  misc_RNA (1)...(19): siRNA sense strand
gaaagaaguggaacagcaa

SEQ ID NO: 2671652 - RNA, 19 nt, Homo sapiens
  misc_RNA (1)...(19): siRNA sense strand
ccuaaaagcacuugugaau

SEQ ID NO: 2671653 - RNA, 19 nt, Homo sapiens
  misc_RNA (1)...(19): siRNA sense strand
ccuuacagauccagaguca

SEQ ID NO: 2671654 - RNA, 19 nt, Homo sapiens
  misc_RNA (1)...(19): siRNA sense strand
gggcaaaagaauuccauaa

SEQ ID NO: 2671655 - RNA, 19 nt, Homo sapiens
  misc_RNA (1)...(19): siRNA sense strand
gguggaaacaacagaaaca

SEQ ID NO: 2671656 - RNA, 19 nt, Homo sapiens
  misc_RNA (1)...(19): siRNA sense strand
agaaagaaguggaacagca

SEQ ID NO: 2671657 - RNA, 19 nt, Homo sapiens
  misc_RNA (1)...(19): siRNA sense strand
gauuaagugaauuggagaa

SEQ ID NO: 2671658 - RNA, 19 nt, Homo sapiens
  misc_RNA (1)...(19): siRNA sense strand
aaagcagauuugaggcaua

SEQ ID NO: 2671659 - RNA, 19 nt, Homo sapiens
  misc_RNA (1)...(19): siRNA sense strand
ucaaacagcuacagcaaga

SEQ ID NO: 2671660 - RNA, 19 nt, Homo sapiens
  misc_RNA (1)...(19): siRNA sense strand
acaggaaggugaaagggaa

SEQ ID NO: 2671661 - RNA, 19 nt, Homo sapiens
  misc_RNA (1)...(19): siRNA sense strand
ugaaagaaaccaagaacca

SEQ ID NO: 2671662 - RNA, 19 nt, Homo sapiens
  misc_RNA (1)...(19): siRNA sense strand
guuuaaacccuuagaacca

SEQ ID NO: 2671663 - RNA, 19 nt, Homo sapiens
  misc_RNA (1)...(19): siRNA sense strand
uugagaacaucgaaguaaa

SEQ ID NO: 2671664 - RNA, 19 nt, Homo sapiens
  misc_RNA (1)...(19): siRNA sense strand
aauaagauccgaagccaaa

SEQ ID NO: 2671665 - RNA, 19 nt, Homo sapiens
  misc_RNA (1)...(19): siRNA sense strand
aaacagagugaauuggaua

SEQ ID NO: 2671666 - RNA, 19 nt, Homo sapiens
  misc_RNA (1)...(19): siRNA sense strand
ggcuagacacugagaaaga

SEQ ID NO: 2671667 - RNA, 19 nt, Homo sapiens
  misc_RNA (1)...(19): siRNA sense strand
gaugauagcaagcaagaau

SEQ ID NO: 2671668 - RNA, 19 nt, Homo sapiens
  misc_RNA (1)...(19): siRNA sense strand
aaguaugggcuuugaagaa

SEQ ID NO: 2671669 - RNA, 19 nt, Homo sapiens
  misc_RNA (1)...(19): siRNA sense strand
acauaaauccacagguaga

SEQ ID NO: 2671670 - RNA, 19 nt, Homo sapiens
  misc_RNA (1)...(19): siRNA sense strand
aggcagcacaagagagaau

SEQ ID NO: 2671671 - RNA, 19 nt, Homo sapiens
  misc_RNA (1)...(19): siRNA sense strand
gaaagaacucaaacagcua

SEQ ID NO: 2671672 - RNA, 19 nt, Homo sapiens
  misc_RNA (1)...(19): siRNA sense strand
gaauagagagacagacaca

SEQ ID NO: 2671673 - RNA, 19 nt, Homo sapiens
  misc_RNA (1)...(19): siRNA sense strand
ggaauuugccuuugaagau

SEQ ID NO: 2671674 - RNA, 19 nt, Homo sapiens
  misc_RNA (1)...(19): siRNA sense strand
ccaagaacagucacaaaua

SEQ ID NO: 2671675 - RNA, 19 nt, Homo sapiens
  misc_RNA (1)...(19): siRNA sense strand
cuucaacagcaguuagaua

SEQ ID NO: 2671676 - RNA, 19 nt, Homo sapiens
  misc_RNA (1)...(19): siRNA sense strand
caguuaagcugaaggaauc

SEQ ID NO: 2671677 - RNA, 19 nt, Homo sapiens
  misc_RNA (1)...(19): siRNA sense strand
agaaacuggccaugguaua

SEQ ID NO: 2671678 - RNA, 19 nt, Homo sapiens
  misc_RNA (1)...(19): siRNA sense strand
cuagaagagaagagcgaga

SEQ ID NO: 2671679 - RNA, 19 nt, Homo sapiens
  misc_RNA (1)...(19): siRNA sense strand
aggacagcaucuacagaaa

SEQ ID NO: 2671680 - RNA, 19 nt, Homo sapiens
  misc_RNA (1)...(19): siRNA sense strand
auaaagaagccuugaaagu

SEQ ID NO: 2671681 - RNA, 19 nt, Homo sapiens
  misc_RNA (1)...(19): siRNA sense strand
gcagaugauucguaacuau

SEQ ID NO: 2671682 - RNA, 19 nt, Homo sapiens
  misc_RNA (1)...(19): siRNA sense strand
ccuccaaauuagaacaaga

SEQ ID NO: 2671683 - RNA, 19 nt, Homo sapiens
  misc_RNA (1)...(19): siRNA sense strand
agaaagugaauuggagaaa

SEQ ID NO: 2671684 - RNA, 19 nt, Homo sapiens
  misc_RNA (1)...(19): siRNA sense strand
ccauguaaauuugaggaaa

SEQ ID NO: 2671685 - RNA, 19 nt, Homo sapiens
  misc_RNA (1)...(19): siRNA sense strand
acagaaacaugaagagacu

SEQ ID NO: 2671686 - RNA, 19 nt, Homo sapiens
  misc_RNA (1)...(19): siRNA sense strand
aagagaagagcgagaauga

SEQ ID NO: 2671687 - RNA, 19 nt, Homo sapiens
  misc_RNA (1)...(19): siRNA sense strand
gcagugaaaugaaagaaga

SEQ ID NO: 2671688 - RNA, 19 nt, Homo sapiens
  misc_RNA (1)...(19): siRNA sense strand
uagaagagcagaagcaaaa

SEQ ID NO: 2671689 - RNA, 19 nt, Homo sapiens
  misc_RNA (1)...(19): siRNA sense strand
ugaauuggauagaagagua

SEQ ID NO: 2671690 - RNA, 19 nt, Homo sapiens
  misc_RNA (1)...(19): siRNA sense strand
acaggaaguccaagaagaa

SEQ ID NO: 2671691 - RNA, 19 nt, Homo sapiens
  misc_RNA (1)...(19): siRNA sense strand
acuacagaguuaaagacaa

SEQ ID NO: 2671692 - RNA, 19 nt, Homo sapiens
  misc_RNA (1)...(19): siRNA sense strand
auagaagaugugaugguaa

SEQ ID NO: 2671693 - RNA, 19 nt, Homo sapiens
  misc_RNA (1)...(19): siRNA sense strand
ugggaaaacucaugggcuu

SEQ ID NO: 2671694 - RNA, 19 nt, Homo sapiens
  misc_RNA (1)...(19): siRNA sense strand
aguuaaagacaaaguggca

SEQ ID NO: 2671695 - RNA, 19 nt, Homo sapiens
  misc_RNA (1)...(19): siRNA sense strand
ugcucaaggucguggccaa

SEQ ID NO: 2671696 - RNA, 19 nt, Homo sapiens
  misc_RNA (1)...(19): siRNA sense strand
augaagaacgaaugguaca

SEQ ID NO: 2671697 - RNA, 19 nt, Homo sapiens
  misc_RNA (1)...(19): siRNA sense strand
ucucauacuucauggccau

SEQ ID NO: 2671698 - RNA, 19 nt, Homo sapiens
  misc_RNA (1)...(19): siRNA sense strand
cuucauggccauuggggaa

SEQ ID NO: 2671699 - RNA, 19 nt, Homo sapiens
  misc_RNA (1)...(19): siRNA sense strand
ccaauuguuugcaaggaca

SEQ ID NO: 2671700 - RNA, 19 nt, Homo sapiens
  misc_RNA (1)...(19): siRNA sense strand
uuaaugaggcagaggccau

SEQ ID NO: 2671701 - RNA, 19 nt, Homo sapiens
  misc_RNA (1)...(19): siRNA sense strand
ggugaaacugagcaagaca

SEQ ID NO: 2671702 - RNA, 19 nt, Homo sapiens
  misc_RNA (1)...(19): siRNA sense strand
ggaaggugcucaaggucgu

SEQ ID NO: 2671703 - RNA, 19 nt, Homo sapiens
  misc_RNA (1)...(19): siRNA sense strand
accaggagcaagaggucua

SEQ ID NO: 2671704 - RNA, 19 nt, Homo sapiens
  misc_RNA (1)...(19): siRNA sense strand
agcaagacacagagaaaau

SEQ ID NO: 2671705 - RNA, 19 nt, Homo sapiens
  misc_RNA (1)...(19): siRNA sense strand
ccugaagaacauugucuau

SEQ ID NO: 2671706 - RNA, 19 nt, Homo sapiens
  misc_RNA (1)...(19): siRNA sense strand
uuaccaaagaggacagcuu

SEQ ID NO: 2671707 - RNA, 19 nt, Homo sapiens
  misc_RNA (1)...(19): siRNA sense strand
ggucagaguggcuggacua

SEQ ID NO: 2671708 - RNA, 19 nt, Homo sapiens
  misc_RNA (1)...(19): siRNA sense strand
ggucagaguggcuggacua

SEQ ID NO: 2671709 - RNA, 19 nt, Homo sapiens
  misc_RNA (1)...(19): siRNA sense strand
ggucagaguggcuggacua

SEQ ID NO: 2671710 - RNA, 19 nt, Homo sapiens
  misc_RNA (1)...(19): siRNA sense strand
ggucagaguggcuggacua

SEQ ID NO: 2671711 - RNA, 19 nt, Homo sapiens
  misc_RNA (1)...(19): siRNA sense strand
guguggagaaugagaacua

SEQ ID NO: 2671712 - RNA, 19 nt, Homo sapiens
  misc_RNA (1)...(19): siRNA sense strand
gcuacgacaaggacggaaa

SEQ ID NO: 2671713 - RNA, 19 nt, Homo sapiens
  misc_RNA (1)...(19): siRNA sense strand
gcgggaacuucgacgacaa

SEQ ID NO: 2671714 - RNA, 19 nt, Homo sapiens
  misc_RNA (1)...(19): siRNA sense strand
acccaaagccuguggccaa

SEQ ID NO: 2671715 - RNA, 19 nt, Homo sapiens
  misc_RNA (1)...(19): siRNA sense strand
ccaucagggucgacugcaa

SEQ ID NO: 2671716 - RNA, 19 nt, Homo sapiens
  misc_RNA (1)...(19): siRNA sense strand
cacuacaaguccauggaua

SEQ ID NO: 2671717 - RNA, 19 nt, Homo sapiens
  misc_RNA (1)...(19): siRNA sense strand
acuacaaguccauggauau

SEQ ID NO: 2671718 - RNA, 19 nt, Homo sapiens
  misc_RNA (1)...(19): siRNA sense strand
cuggagagguggugcacga

SEQ ID NO: 2671719 - RNA, 19 nt, Homo sapiens
  misc_RNA (1)...(19): siRNA sense strand
acguugaguccuacgauaa

SEQ ID NO: 2671720 - RNA, 19 nt, Homo sapiens
  misc_RNA (1)...(19): siRNA sense strand
ccuauguccucaugagaga

SEQ ID NO: 2671721 - RNA, 19 nt, Homo sapiens
  misc_RNA (1)...(19): siRNA sense strand
gagaacugccagagcugua

SEQ ID NO: 2671722 - RNA, 19 nt, Homo sapiens
  misc_RNA (1)...(19): siRNA sense strand
gcagaaaagcacagggugu

SEQ ID NO: 2671723 - RNA, 19 nt, Homo sapiens
  misc_RNA (1)...(19): siRNA sense strand
ccugggaggcggagacuuu

SEQ ID NO: 2671724 - RNA, 19 nt, Homo sapiens
  misc_RNA (1)...(19): siRNA sense strand
cugaaugaaaccuggguca

SEQ ID NO: 2671725 - RNA, 19 nt, Homo sapiens
  misc_RNA (1)...(19): siRNA sense strand
ccaccuaugaugagaaacu

SEQ ID NO: 2671726 - RNA, 19 nt, Homo sapiens
  misc_RNA (1)...(19): siRNA sense strand
acaacaacaccgagggcca

SEQ ID NO: 2671727 - RNA, 19 nt, Homo sapiens
  misc_RNA (1)...(19): siRNA sense strand
ucaacagccauguggacaa

SEQ ID NO: 2671728 - RNA, 19 nt, Homo sapiens
  misc_RNA (1)...(19): siRNA sense strand
gcaccaacaaccagaggga

SEQ ID NO: 2671729 - RNA, 19 nt, Homo sapiens
  misc_RNA (1)...(19): siRNA sense strand
acaucuuggcccaggacua

SEQ ID NO: 2671730 - RNA, 19 nt, Homo sapiens
  misc_RNA (1)...(19): siRNA sense strand
ccaugcacgcuuugggaau

SEQ ID NO: 2671731 - RNA, 19 nt, Homo sapiens
  misc_RNA (1)...(19): siRNA sense strand
gcuuugaguacaagagagu

SEQ ID NO: 2671732 - RNA, 19 nt, Homo sapiens
  misc_RNA (1)...(19): siRNA sense strand
gcaccaaagagcauagagu

SEQ ID NO: 2671733 - RNA, 19 nt, Homo sapiens
  misc_RNA (1)...(19): siRNA sense strand
gcgaguacaucuuggccca

SEQ ID NO: 2671734 - RNA, 19 nt, Homo sapiens
  misc_RNA (1)...(19): siRNA sense strand
cuaaggacauagagugcca

SEQ ID NO: 2671735 - RNA, 19 nt, Homo sapiens
  misc_RNA (1)...(19): siRNA sense strand
cuacaagccuggagagacc

SEQ ID NO: 2671736 - RNA, 19 nt, Homo sapiens
  misc_RNA (1)...(19): siRNA sense strand
cagcaggaccaccgaguca

SEQ ID NO: 2671737 - RNA, 19 nt, Homo sapiens
  misc_RNA (1)...(19): siRNA sense strand
cagcaggaccaccgaguca

SEQ ID NO: 2671738 - RNA, 19 nt, Homo sapiens
  misc_RNA (1)...(19): siRNA sense strand
cagcaggaccaccgaguca

SEQ ID NO: 2671739 - RNA, 19 nt, Homo sapiens
  misc_RNA (1)...(19): siRNA sense strand
aggacaggaccuacagcua

SEQ ID NO: 2671740 - RNA, 19 nt, Homo sapiens
  misc_RNA (1)...(19): siRNA sense strand
guugcaaggacauggccaa

SEQ ID NO: 2671741 - RNA, 19 nt, Homo sapiens
  misc_RNA (1)...(19): siRNA sense strand
agaccuggacccuggagaa

SEQ ID NO: 2671742 - RNA, 19 nt, Homo sapiens
  misc_RNA (1)...(19): siRNA sense strand
cgacaaggacggaaacuac

SEQ ID NO: 2671743 - RNA, 19 nt, Homo sapiens
  misc_RNA (1)...(19): siRNA sense strand
ccaucaagcucuucgugga

SEQ ID NO: 2671744 - RNA, 19 nt, Homo sapiens
  misc_RNA (1)...(19): siRNA sense strand
gcccagaagcagugcagca

SEQ ID NO: 2671745 - RNA, 19 nt, Homo sapiens
  misc_RNA (1)...(19): siRNA sense strand
gcaucgucaccgagaacau

SEQ ID NO: 2671746 - RNA, 19 nt, Homo sapiens
  misc_RNA (1)...(19): siRNA sense strand
acuuaugccagcagccuaa

SEQ ID NO: 2671747 - RNA, 19 nt, Homo sapiens
  misc_RNA (1)...(19): siRNA sense strand
aggacagagacgacaauga

SEQ ID NO: 2671748 - RNA, 19 nt, Homo sapiens
  misc_RNA (1)...(19): siRNA sense strand
caaucagcacugugacauu

SEQ ID NO: 2671749 - RNA, 19 nt, Homo sapiens
  misc_RNA (1)...(19): siRNA sense strand
ccaaagagccgcugaccac

SEQ ID NO: 2671750 - RNA, 19 nt, Homo sapiens
  misc_RNA (1)...(19): siRNA sense strand
cuaccaaagugcugacuac

SEQ ID NO: 2671751 - RNA, 19 nt, Homo sapiens
  misc_RNA (1)...(19): siRNA sense strand
gcaccaggaguguggcuca

SEQ ID NO: 2671752 - RNA, 19 nt, Homo sapiens
  misc_RNA (1)...(19): siRNA sense strand
gggacgaccuggauccuca

SEQ ID NO: 2671753 - RNA, 19 nt, Homo sapiens
  misc_RNA (1)...(19): siRNA sense strand
gggacgaccuggauccuca

SEQ ID NO: 2671754 - RNA, 19 nt, Homo sapiens
  misc_RNA (1)...(19): siRNA sense strand
gggacgaccuggauccuca

SEQ ID NO: 2671755 - RNA, 19 nt, Homo sapiens
  misc_RNA (1)...(19): siRNA sense strand
gggacgaccuggauccuca

SEQ ID NO: 2671756 - RNA, 19 nt, Homo sapiens
  misc_RNA (1)...(19): siRNA sense strand
gggacgaccuggauccuca

SEQ ID NO: 2671757 - RNA, 19 nt, Homo sapiens
  misc_RNA (1)...(19): siRNA sense strand
gggacgaccuggauccuca

SEQ ID NO: 2671758 - RNA, 19 nt, Homo sapiens
  misc_RNA (1)...(19): siRNA sense strand
gggacgaccuggauccuca

SEQ ID NO: 2671759 - RNA, 19 nt, Homo sapiens
  misc_RNA (1)...(19): siRNA sense strand
cccucaguguggagaauga

SEQ ID NO: 2671760 - RNA, 19 nt, Homo sapiens
  misc_RNA (1)...(19): siRNA sense strand
ccuacagccucuuccacaa

SEQ ID NO: 2671761 - RNA, 19 nt, Homo sapiens
  misc_RNA (1)...(19): siRNA sense strand
cagagugguuugaugagga

SEQ ID NO: 2671762 - RNA, 19 nt, Homo sapiens
  misc_RNA (1)...(19): siRNA sense strand
gcuaccagcuuuacagcca

SEQ ID NO: 2671763 - RNA, 19 nt, Homo sapiens
  misc_RNA (1)...(19): siRNA sense strand
gcuaccagcuuuacagcca

SEQ ID NO: 2671764 - RNA, 19 nt, Homo sapiens
  misc_RNA (1)...(19): siRNA sense strand
acgaaggccaccacgacaa

SEQ ID NO: 2671765 - RNA, 19 nt, Homo sapiens
  misc_RNA (1)...(19): siRNA sense strand
gcuaccagcuuuacagcca

SEQ ID NO: 2671766 - RNA, 19 nt, Homo sapiens
  misc_RNA (1)...(19): siRNA sense strand
gcacugagaagcacagcca

SEQ ID NO: 2671767 - RNA, 19 nt, Homo sapiens
  misc_RNA (1)...(19): siRNA sense strand
gcacugagaagcacagcca

SEQ ID NO: 2671768 - RNA, 19 nt, Homo sapiens
  misc_RNA (1)...(19): siRNA sense strand
gcacugagaagcacagcca

SEQ ID NO: 2671769 - RNA, 19 nt, Homo sapiens
  misc_RNA (1)...(19): siRNA sense strand
gcacugagaagcacagcca

SEQ ID NO: 2671770 - RNA, 19 nt, Homo sapiens
  misc_RNA (1)...(19): siRNA sense strand
gcacugagaagcacagcca

SEQ ID NO: 2671771 - RNA, 19 nt, Homo sapiens
  misc_RNA (1)...(19): siRNA sense strand
agacggugugcgugugcaa

SEQ ID NO: 2671772 - RNA, 19 nt, Homo sapiens
  misc_RNA (1)...(19): siRNA sense strand
ggaagaaagacgagcgaga

SEQ ID NO: 2671773 - RNA, 19 nt, Homo sapiens
  misc_RNA (1)...(19): siRNA sense strand
gggcagagugcuagagcua

SEQ ID NO: 2671774 - RNA, 19 nt, Homo sapiens
  misc_RNA (1)...(19): siRNA sense strand
ggagaaaggacgugagauc

SEQ ID NO: 2671775 - RNA, 19 nt, Homo sapiens
  misc_RNA (1)...(19): siRNA sense strand
aagaaagacgagcgagaaa

SEQ ID NO: 2671776 - RNA, 19 nt, Homo sapiens
  misc_RNA (1)...(19): siRNA sense strand
caucaagagccuagguuau

SEQ ID NO: 2671777 - RNA, 19 nt, Homo sapiens
  misc_RNA (1)...(19): siRNA sense strand
caaagaagucacagcagaa

SEQ ID NO: 2671778 - RNA, 19 nt, Homo sapiens
  misc_RNA (1)...(19): siRNA sense strand
gcagagaggguguggacau

SEQ ID NO: 2671779 - RNA, 19 nt, Homo sapiens
  misc_RNA (1)...(19): siRNA sense strand
gggcgaggcuaucacgaaa

SEQ ID NO: 2671780 - RNA, 19 nt, Homo sapiens
  misc_RNA (1)...(19): siRNA sense strand
gagacagggcagagugcua

SEQ ID NO: 2671781 - RNA, 19 nt, Homo sapiens
  misc_RNA (1)...(19): siRNA sense strand
ugaacaaguuggacgugaa

SEQ ID NO: 2671782 - RNA, 19 nt, Homo sapiens
  misc_RNA (1)...(19): siRNA sense strand
caaaggagacauuggccaa

SEQ ID NO: 2671783 - RNA, 19 nt, Homo sapiens
  misc_RNA (1)...(19): siRNA sense strand
gcauccuggugguggacaa

SEQ ID NO: 2671784 - RNA, 19 nt, Homo sapiens
  misc_RNA (1)...(19): siRNA sense strand
uggaugaucuacagaccaa

SEQ ID NO: 2671785 - RNA, 19 nt, Homo sapiens
  misc_RNA (1)...(19): siRNA sense strand
acaaagaagucacagcaga

SEQ ID NO: 2671786 - RNA, 19 nt, Homo sapiens
  misc_RNA (1)...(19): siRNA sense strand
ggagacgcuuggaguggaa

SEQ ID NO: 2671787 - RNA, 19 nt, Homo sapiens
  misc_RNA (1)...(19): siRNA sense strand
gcuaagagccccaaagaca

SEQ ID NO: 2671788 - RNA, 19 nt, Homo sapiens
  misc_RNA (1)...(19): siRNA sense strand
aggcugaugacgaggguga

SEQ ID NO: 2671789 - RNA, 19 nt, Homo sapiens
  misc_RNA (1)...(19): siRNA sense strand
cgaaaagagaggaggaauc

SEQ ID NO: 2671790 - RNA, 19 nt, Homo sapiens
  misc_RNA (1)...(19): siRNA sense strand
ggacgugaaugcugaggca

SEQ ID NO: 2671791 - RNA, 19 nt, Homo sapiens
  misc_RNA (1)...(19): siRNA sense strand
ucaucaacaucaaagggaa

SEQ ID NO: 2671792 - RNA, 19 nt, Homo sapiens
  misc_RNA (1)...(19): siRNA sense strand
ccaaagaugaagagggcag

SEQ ID NO: 2671793 - RNA, 19 nt, Homo sapiens
  misc_RNA (1)...(19): siRNA sense strand
acaccaaagugaagacaac

SEQ ID NO: 2671794 - RNA, 19 nt, Homo sapiens
  misc_RNA (1)...(19): siRNA sense strand
cagccagggaagaagagua

SEQ ID NO: 2671795 - RNA, 19 nt, Homo sapiens
  misc_RNA (1)...(19): siRNA sense strand
acaucaagagccuagguua

SEQ ID NO: 2671796 - RNA, 19 nt, Homo sapiens
  misc_RNA (1)...(19): siRNA sense strand
gcaccagaccacagaacca

SEQ ID NO: 2671797 - RNA, 19 nt, Homo sapiens
  misc_RNA (1)...(19): siRNA sense strand
ggaggaaucaguagggauc

SEQ ID NO: 2671798 - RNA, 19 nt, Homo sapiens
  misc_RNA (1)...(19): siRNA sense strand
agucacagcagaagcccaa

SEQ ID NO: 2671799 - RNA, 19 nt, Homo sapiens
  misc_RNA (1)...(19): siRNA sense strand
ccacaagcacagaccauca

SEQ ID NO: 2671800 - RNA, 19 nt, Homo sapiens
  misc_RNA (1)...(19): siRNA sense strand
uagacaugguggugcgcuu

SEQ ID NO: 2671801 - RNA, 19 nt, Homo sapiens
  misc_RNA (1)...(19): siRNA sense strand
gcaaaggagacauuggcca

SEQ ID NO: 2671802 - RNA, 19 nt, Homo sapiens
  misc_RNA (1)...(19): siRNA sense strand
gaugaagagggcagggcca

SEQ ID NO: 2671803 - RNA, 19 nt, Homo sapiens
  misc_RNA (1)...(19): siRNA sense strand
gugaauauguaugccgcaa

SEQ ID NO: 2671804 - RNA, 19 nt, Homo sapiens
  misc_RNA (1)...(19): siRNA sense strand
ggaucucauuagagguguu

SEQ ID NO: 2671805 - RNA, 19 nt, Homo sapiens
  misc_RNA (1)...(19): siRNA sense strand
gaagaaagacgagcgagaa

SEQ ID NO: 2671806 - RNA, 19 nt, Homo sapiens
  misc_RNA (1)...(19): siRNA sense strand
gaacaaguuggacgugaau

SEQ ID NO: 2671807 - RNA, 19 nt, Homo sapiens
  misc_RNA (1)...(19): siRNA sense strand
gugagauccugcugaaaau

SEQ ID NO: 2671808 - RNA, 19 nt, Homo sapiens
  misc_RNA (1)...(19): siRNA sense strand
acaugaagcugcagcacgu

SEQ ID NO: 2671809 - RNA, 19 nt, Homo sapiens
  misc_RNA (1)...(19): siRNA sense strand
cagccaacaucaagagccu

SEQ ID NO: 2671810 - RNA, 19 nt, Homo sapiens
  misc_RNA (1)...(19): siRNA sense strand
cagcagaagcccaacagca

SEQ ID NO: 2671811 - RNA, 19 nt, Homo sapiens
  misc_RNA (1)...(19): siRNA sense strand
gauucuuggaacagggcau

SEQ ID NO: 2671812 - RNA, 19 nt, Homo sapiens
  misc_RNA (1)...(19): siRNA sense strand
uggugaagaaguacaugaa

SEQ ID NO: 2671813 - RNA, 19 nt, Homo sapiens
  misc_RNA (1)...(19): siRNA sense strand
aggaggaaucaguagggau

SEQ ID NO: 2671814 - RNA, 19 nt, Homo sapiens
  misc_RNA (1)...(19): siRNA sense strand
ugaauauguaugccgcaaa

SEQ ID NO: 2671815 - RNA, 19 nt, Homo sapiens
  misc_RNA (1)...(19): siRNA sense strand
caucaacaucaaagggaac

SEQ ID NO: 2671816 - RNA, 19 nt, Homo sapiens
  misc_RNA (1)...(19): siRNA sense strand
gcgaguauccacaagcaca

SEQ ID NO: 2671817 - RNA, 19 nt, Homo sapiens
  misc_RNA (1)...(19): siRNA sense strand
gaggagaaaggacgugaga

SEQ ID NO: 2671818 - RNA, 19 nt, Homo sapiens
  misc_RNA (1)...(19): siRNA sense strand
ccagauaagugcagggaac

SEQ ID NO: 2671819 - RNA, 19 nt, Homo sapiens
  misc_RNA (1)...(19): siRNA sense strand
ggacagucgcugagcucaa

SEQ ID NO: 2671820 - RNA, 19 nt, Homo sapiens
  misc_RNA (1)...(19): siRNA sense strand
gcccaaagcuucaggucuu

SEQ ID NO: 2671821 - RNA, 19 nt, Homo sapiens
  misc_RNA (1)...(19): siRNA sense strand
uugcccaacuggugagaaa

SEQ ID NO: 2671822 - RNA, 19 nt, Homo sapiens
  misc_RNA (1)...(19): siRNA sense strand
ggugugggcaagagagcua

SEQ ID NO: 2671823 - RNA, 19 nt, Homo sapiens
  misc_RNA (1)...(19): siRNA sense strand
ggacacuaaaugugaccaa

SEQ ID NO: 2671824 - RNA, 19 nt, Homo sapiens
  misc_RNA (1)...(19): siRNA sense strand
ggucccagguugacaguga

SEQ ID NO: 2671825 - RNA, 19 nt, Homo sapiens
  misc_RNA (1)...(19): siRNA sense strand
gggaggaggugaagcugca

SEQ ID NO: 2671826 - RNA, 19 nt, Homo sapiens
  misc_RNA (1)...(19): siRNA sense strand
gcagauacuggaagacaca

SEQ ID NO: 2671827 - RNA, 19 nt, Homo sapiens
  misc_RNA (1)...(19): siRNA sense strand
gugacgaugugccagauaa

SEQ ID NO: 2671828 - RNA, 19 nt, Homo sapiens
  misc_RNA (1)...(19): siRNA sense strand
cauuggugguggaggaacu

SEQ ID NO: 2671829 - RNA, 19 nt, Homo sapiens
  misc_RNA (1)...(19): siRNA sense strand
uggcagaaguuaccagcau

SEQ ID NO: 2671830 - RNA, 19 nt, Homo sapiens
  misc_RNA (1)...(19): siRNA sense strand
ggaagacacaauacggaca

SEQ ID NO: 2671831 - RNA, 19 nt, Homo sapiens
  misc_RNA (1)...(19): siRNA sense strand
ccagaagccucgcagccua

SEQ ID NO: 2671832 - RNA, 19 nt, Homo sapiens
  misc_RNA (1)...(19): siRNA sense strand
ggagaaaguucaucagcug

SEQ ID NO: 2671833 - RNA, 19 nt, Homo sapiens
  misc_RNA (1)...(19): siRNA sense strand
gcccaaacacacagacuca

SEQ ID NO: 2671834 - RNA, 19 nt, Homo sapiens
  misc_RNA (1)...(19): siRNA sense strand
guccuaauggugugggcaa

SEQ ID NO: 2671835 - RNA, 19 nt, Homo sapiens
  misc_RNA (1)...(19): siRNA sense strand
agccauuggugguggagga

SEQ ID NO: 2671836 - RNA, 19 nt, Homo sapiens
  misc_RNA (1)...(19): siRNA sense strand
ugaccaaggaggaaccgaa

SEQ ID NO: 2671837 - RNA, 19 nt, Homo sapiens
  misc_RNA (1)...(19): siRNA sense strand
ccuuggaacaguugagcca

SEQ ID NO: 2671838 - RNA, 19 nt, Homo sapiens
  misc_RNA (1)...(19): siRNA sense strand
agacucagguggaggcacu

SEQ ID NO: 2671839 - RNA, 19 nt, Homo sapiens
  misc_RNA (1)...(19): siRNA sense strand
uggcagaggaggugguaug

SEQ ID NO: 2671840 - RNA, 19 nt, Homo sapiens
  misc_RNA (1)...(19): siRNA sense strand
ccgaaacacaagcaccaua

SEQ ID NO: 2671841 - RNA, 19 nt, Homo sapiens
  misc_RNA (1)...(19): siRNA sense strand
ucuuaagacuauugcaucu

SEQ ID NO: 2671842 - RNA, 19 nt, Homo sapiens
  misc_RNA (1)...(19): siRNA sense strand
cuggauaauaugugaugga

SEQ ID NO: 2671843 - RNA, 19 nt, Homo sapiens
  misc_RNA (1)...(19): siRNA sense strand
ugacuuacaagcugaugaa

SEQ ID NO: 2671844 - RNA, 19 nt, Homo sapiens
  misc_RNA (1)...(19): siRNA sense strand
gugcagccggucaguguaa

SEQ ID NO: 2671845 - RNA, 19 nt, Homo sapiens
  misc_RNA (1)...(19): siRNA sense strand
ggauagaugugcuaggcag

SEQ ID NO: 2671846 - RNA, 19 nt, Homo sapiens
  misc_RNA (1)...(19): siRNA sense strand
gcaguagcuucuuugaaaa

SEQ ID NO: 2671847 - RNA, 19 nt, Homo sapiens
  misc_RNA (1)...(19): siRNA sense strand
acacaauacggacacuaaa

SEQ ID NO: 2671848 - RNA, 19 nt, Homo sapiens
  misc_RNA (1)...(19): siRNA sense strand
gggaacacuugcuggcugu

SEQ ID NO: 2671849 - RNA, 19 nt, Homo sapiens
  misc_RNA (1)...(19): siRNA sense strand
agcuugagguacuggugaa

SEQ ID NO: 2671850 - RNA, 19 nt, Homo sapiens
  misc_RNA (1)...(19): siRNA sense strand
gcucaagcagauacuggaa

SEQ ID NO: 2671851 - RNA, 19 nt, Homo sapiens
  misc_RNA (1)...(19): siRNA sense strand
ugggauggcuagagggcuc

SEQ ID NO: 2671852 - RNA, 19 nt, Homo sapiens
  misc_RNA (1)...(19): siRNA sense strand
aagcaacugcccaagcaaa

SEQ ID NO: 2671853 - RNA, 19 nt, Homo sapiens
  misc_RNA (1)...(19): siRNA sense strand
agugugugcugguggcaga

SEQ ID NO: 2671854 - RNA, 19 nt, Homo sapiens
  misc_RNA (1)...(19): siRNA sense strand
aggaggaaccgaagugcca

SEQ ID NO: 2671855 - RNA, 19 nt, Homo sapiens
  misc_RNA (1)...(19): siRNA sense strand
aggaggagaagcagagaaa

SEQ ID NO: 2671856 - RNA, 19 nt, Homo sapiens
  misc_RNA (1)...(19): siRNA sense strand
agauaaggaccgucggaua

SEQ ID NO: 2671857 - RNA, 19 nt, Homo sapiens
  misc_RNA (1)...(19): siRNA sense strand
acaccaaacaggaggagaa

SEQ ID NO: 2671858 - RNA, 19 nt, Homo sapiens
  misc_RNA (1)...(19): siRNA sense strand
aaguagaagcccagggaga

SEQ ID NO: 2671859 - RNA, 19 nt, Homo sapiens
  misc_RNA (1)...(19): siRNA sense strand
cugcugaggcugagagaca

SEQ ID NO: 2671860 - RNA, 19 nt, Homo sapiens
  misc_RNA (1)...(19): siRNA sense strand
uggagaaggagcagagaga

SEQ ID NO: 2671861 - RNA, 19 nt, Homo sapiens
  misc_RNA (1)...(19): siRNA sense strand
cgaagaacucagucaggaa

SEQ ID NO: 2671862 - RNA, 19 nt, Homo sapiens
  misc_RNA (1)...(19): siRNA sense strand
guagaagcccagggagaaa

SEQ ID NO: 2671863 - RNA, 19 nt, Homo sapiens
  misc_RNA (1)...(19): siRNA sense strand
cugaaaauggggauggaaa

SEQ ID NO: 2671864 - RNA, 19 nt, Homo sapiens
  misc_RNA (1)...(19): siRNA sense strand
ccucaaaaucaaaguggaa

SEQ ID NO: 2671865 - RNA, 19 nt, Homo sapiens
  misc_RNA (1)...(19): siRNA sense strand
ggccagcugaugagaguaa

SEQ ID NO: 2671866 - RNA, 19 nt, Homo sapiens
  misc_RNA (1)...(19): siRNA sense strand
agagaaaagcagaggaguu

SEQ ID NO: 2671867 - RNA, 19 nt, Homo sapiens
  misc_RNA (1)...(19): siRNA sense strand
augcagaaauugagcgucu

SEQ ID NO: 2671868 - RNA, 19 nt, Homo sapiens
  misc_RNA (1)...(19): siRNA sense strand
ggaccaggugggacagauu

SEQ ID NO: 2671869 - RNA, 19 nt, Homo sapiens
  misc_RNA (1)...(19): siRNA sense strand
cugaagugucugagcugaa

SEQ ID NO: 2671870 - RNA, 19 nt, Homo sapiens
  misc_RNA (1)...(19): siRNA sense strand
aguaugaauggaagcuaaa

SEQ ID NO: 2671871 - RNA, 19 nt, Homo sapiens
  misc_RNA (1)...(19): siRNA sense strand
aggcugagagacacagaaa

SEQ ID NO: 2671872 - RNA, 19 nt, Homo sapiens
  misc_RNA (1)...(19): siRNA sense strand
ucacacagagagagaccaa

SEQ ID NO: 2671873 - RNA, 19 nt, Homo sapiens
  misc_RNA (1)...(19): siRNA sense strand
cagagagagaccaagaaau

SEQ ID NO: 2671874 - RNA, 19 nt, Homo sapiens
  misc_RNA (1)...(19): siRNA sense strand
uggaaaaggagcuaggaau

SEQ ID NO: 2671875 - RNA, 19 nt, Homo sapiens
  misc_RNA (1)...(19): siRNA sense strand
guggauaaguguauggaug

SEQ ID NO: 2671876 - RNA, 19 nt, Homo sapiens
  misc_RNA (1)...(19): siRNA sense strand
uguuaaaccaguaccggaa

SEQ ID NO: 2671877 - RNA, 19 nt, Homo sapiens
  misc_RNA (1)...(19): siRNA sense strand
aaguggaagaguuggaaaa

SEQ ID NO: 2671878 - RNA, 19 nt, Homo sapiens
  misc_RNA (1)...(19): siRNA sense strand
acacagagagagaccaaga

SEQ ID NO: 2671879 - RNA, 19 nt, Homo sapiens
  misc_RNA (1)...(19): siRNA sense strand
acagagagagaccaagaaa

SEQ ID NO: 2671880 - RNA, 19 nt, Homo sapiens
  misc_RNA (1)...(19): siRNA sense strand
ucauauugcaggugagugu

SEQ ID NO: 2671881 - RNA, 19 nt, Homo sapiens
  misc_RNA (1)...(19): siRNA sense strand
gagcaggaggagaagcaga

SEQ ID NO: 2671882 - RNA, 19 nt, Homo sapiens
  misc_RNA (1)...(19): siRNA sense strand
caauggagaggcugccaaa

SEQ ID NO: 2671883 - RNA, 19 nt, Homo sapiens
  misc_RNA (1)...(19): siRNA sense strand
agagcuugucccagguaaa

SEQ ID NO: 2671884 - RNA, 19 nt, Homo sapiens
  misc_RNA (1)...(19): siRNA sense strand
gagaaggagcagagagagc

SEQ ID NO: 2671885 - RNA, 19 nt, Homo sapiens
  misc_RNA (1)...(19): siRNA sense strand
ccaccaaguucaaugccuu

SEQ ID NO: 2671886 - RNA, 19 nt, Homo sapiens
  misc_RNA (1)...(19): siRNA sense strand
gagagcaggaggagaagca

SEQ ID NO: 2671887 - RNA, 19 nt, Homo sapiens
  misc_RNA (1)...(19): siRNA sense strand
gaauggaagcuaaaggcca

SEQ ID NO: 2671888 - RNA, 19 nt, Homo sapiens
  misc_RNA (1)...(19): siRNA sense strand
ccagggacuccaagggaca

SEQ ID NO: 2671889 - RNA, 19 nt, Homo sapiens
  misc_RNA (1)...(19): siRNA sense strand
ccaaacaggaggagaaguc

SEQ ID NO: 2671890 - RNA, 19 nt, Homo sapiens
  misc_RNA (1)...(19): siRNA sense strand
ggccaaggaaacuaggauu

SEQ ID NO: 2671891 - RNA, 19 nt, Homo sapiens
  misc_RNA (1)...(19): siRNA sense strand
aguagaagcccagggagaa

SEQ ID NO: 2671892 - RNA, 19 nt, Homo sapiens
  misc_RNA (1)...(19): siRNA sense strand
cuuucuuggcggagcacaa

SEQ ID NO: 2671893 - RNA, 19 nt, Homo sapiens
  misc_RNA (1)...(19): siRNA sense strand
ggaagguaaaggagauugu

SEQ ID NO: 2671894 - RNA, 19 nt, Homo sapiens
  misc_RNA (1)...(19): siRNA sense strand
ccaagacucucuaggacca

SEQ ID NO: 2671895 - RNA, 19 nt, Homo sapiens
  misc_RNA (1)...(19): siRNA sense strand
aaucaaaguggaagaguug

SEQ ID NO: 2671896 - RNA, 19 nt, Homo sapiens
  misc_RNA (1)...(19): siRNA sense strand
augaaaggaaucaguauga

SEQ ID NO: 2671897 - RNA, 19 nt, Homo sapiens
  misc_RNA (1)...(19): siRNA sense strand
agagagaccaagaaauuca

SEQ ID NO: 2671898 - RNA, 19 nt, Homo sapiens
  misc_RNA (1)...(19): siRNA sense strand
ucucaaucaaugaagaaga

SEQ ID NO: 2671899 - RNA, 19 nt, Homo sapiens
  misc_RNA (1)...(19): siRNA sense strand
aagaagaaccggagggagg

SEQ ID NO: 2671900 - RNA, 19 nt, Homo sapiens
  misc_RNA (1)...(19): siRNA sense strand
gagaagugaaucuguggau

SEQ ID NO: 2671901 - RNA, 19 nt, Homo sapiens
  misc_RNA (1)...(19): siRNA sense strand
cuucggaaacauaagaaaa

SEQ ID NO: 2671902 - RNA, 19 nt, Homo sapiens
  misc_RNA (1)...(19): siRNA sense strand
gaggagaagcagagaaaag

SEQ ID NO: 2671903 - RNA, 19 nt, Homo sapiens
  misc_RNA (1)...(19): siRNA sense strand
guuggaaaaugaaaggaau

SEQ ID NO: 2671904 - RNA, 19 nt, Homo sapiens
  misc_RNA (1)...(19): siRNA sense strand
ugagagucacacagagaga

SEQ ID NO: 2671905 - RNA, 19 nt, Homo sapiens
  misc_RNA (1)...(19): siRNA sense strand
acggaaucccaaaggcauu

SEQ ID NO: 2671906 - RNA, 19 nt, Homo sapiens
  misc_RNA (1)...(19): siRNA sense strand
cugcaauaccuaacuguga

SEQ ID NO: 2671907 - RNA, 19 nt, Homo sapiens
  misc_RNA (1)...(19): siRNA sense strand
acccaaucuucgagggagu

SEQ ID NO: 2671908 - RNA, 19 nt, Homo sapiens
  misc_RNA (1)...(19): siRNA sense strand
agguaaaggagauugugau

SEQ ID NO: 2671909 - RNA, 19 nt, Homo sapiens
  misc_RNA (1)...(19): siRNA sense strand
gguaaaggagauugugaug

SEQ ID NO: 2671910 - RNA, 19 nt, Homo sapiens
  misc_RNA (1)...(19): siRNA sense strand
cggagggagguuucagcaa

SEQ ID NO: 2671911 - RNA, 19 nt, Homo sapiens
  misc_RNA (1)...(19): siRNA sense strand
auaaguguauggaugggaa

SEQ ID NO: 2671912 - RNA, 19 nt, Homo sapiens
  misc_RNA (1)...(19): siRNA sense strand
ugguaaacggaaucccaaa

SEQ ID NO: 2671913 - RNA, 19 nt, Homo sapiens
  misc_RNA (1)...(19): siRNA sense strand
ucaaaaucaaaguggaaga

SEQ ID NO: 2671914 - RNA, 19 nt, Homo sapiens
  misc_RNA (1)...(19): siRNA sense strand
ccucaauggcggagaguua

SEQ ID NO: 2671915 - RNA, 19 nt, Homo sapiens
  misc_RNA (1)...(19): siRNA sense strand
cgacauauggagaaugaaa

SEQ ID NO: 2671916 - RNA, 19 nt, Homo sapiens
  misc_RNA (1)...(19): siRNA sense strand
caauagagaaugaggacuu

SEQ ID NO: 2671917 - RNA, 19 nt, Homo sapiens
  misc_RNA (1)...(19): siRNA sense strand
gggcacaucuccugaagaa

SEQ ID NO: 2671918 - RNA, 19 nt, Homo sapiens
  misc_RNA (1)...(19): siRNA sense strand
cccuagagcuggaugcaaa

SEQ ID NO: 2671919 - RNA, 19 nt, Homo sapiens
  misc_RNA (1)...(19): siRNA sense strand
ggagaaugaaagagcaaaa

SEQ ID NO: 2671920 - RNA, 19 nt, Homo sapiens
  misc_RNA (1)...(19): siRNA sense strand
caaaagagugugagaauuu

SEQ ID NO: 2671921 - RNA, 19 nt, Homo sapiens
  misc_RNA (1)...(19): siRNA sense strand
gcauguaugaccagaagaa

SEQ ID NO: 2671922 - RNA, 19 nt, Homo sapiens
  misc_RNA (1)...(19): siRNA sense strand
cggcauuauuaccagauua

SEQ ID NO: 2671923 - RNA, 19 nt, Homo sapiens
  misc_RNA (1)...(19): siRNA sense strand
aaagagaaccagagcauca

SEQ ID NO: 2671924 - RNA, 19 nt, Homo sapiens
  misc_RNA (1)...(19): siRNA sense strand
ccuucaauagugagcauaa

SEQ ID NO: 2671925 - RNA, 19 nt, Homo sapiens
  misc_RNA (1)...(19): siRNA sense strand
ggaguacgacugugagaau

SEQ ID NO: 2671926 - RNA, 19 nt, Homo sapiens
  misc_RNA (1)...(19): siRNA sense strand
gaccagaagaagugugaga

SEQ ID NO: 2671927 - RNA, 19 nt, Homo sapiens
  misc_RNA (1)...(19): siRNA sense strand
ggaggaagcugcaaaagaa

SEQ ID NO: 2671928 - RNA, 19 nt, Homo sapiens
  misc_RNA (1)...(19): siRNA sense strand
gagagaugccuguguucaa

SEQ ID NO: 2671929 - RNA, 19 nt, Homo sapiens
  misc_RNA (1)...(19): siRNA sense strand
gaggaggugucuagugaga

SEQ ID NO: 2671930 - RNA, 19 nt, Homo sapiens
  misc_RNA (1)...(19): siRNA sense strand
caaaagagaaccagagcau

SEQ ID NO: 2671931 - RNA, 19 nt, Homo sapiens
  misc_RNA (1)...(19): siRNA sense strand
cccaaaagagugugagaau

SEQ ID NO: 2671932 - RNA, 19 nt, Homo sapiens
  misc_RNA (1)...(19): siRNA sense strand
auggagaaugaaagagcaa

SEQ ID NO: 2671933 - RNA, 19 nt, Homo sapiens
  misc_RNA (1)...(19): siRNA sense strand
gcacaucuccugaagaaca

SEQ ID NO: 2671934 - RNA, 19 nt, Homo sapiens
  misc_RNA (1)...(19): siRNA sense strand
ggaagaaaggucacuguca

SEQ ID NO: 2671935 - RNA, 19 nt, Homo sapiens
  misc_RNA (1)...(19): siRNA sense strand
ccgaggaggugucuaguga

SEQ ID NO: 2671936 - RNA, 19 nt, Homo sapiens
  misc_RNA (1)...(19): siRNA sense strand
acauauggagaaugaaaga

SEQ ID NO: 2671937 - RNA, 19 nt, Homo sapiens
  misc_RNA (1)...(19): siRNA sense strand
caccagaaguggagggcac

SEQ ID NO: 2671938 - RNA, 19 nt, Homo sapiens
  misc_RNA (1)...(19): siRNA sense strand
ggaggugucuagugagagu

SEQ ID NO: 2671939 - RNA, 19 nt, Homo sapiens
  misc_RNA (1)...(19): siRNA sense strand
ucacugacuuacugggaca

SEQ ID NO: 2671940 - RNA, 19 nt, Homo sapiens
  misc_RNA (1)...(19): siRNA sense strand
gcgacgacauauggagaau

SEQ ID NO: 2671941 - RNA, 19 nt, Homo sapiens
  misc_RNA (1)...(19): siRNA sense strand
cagcaguaccagaacccaa

SEQ ID NO: 2671942 - RNA, 19 nt, Homo sapiens
  misc_RNA (1)...(19): siRNA sense strand
gugugagaauuuugaacaa

SEQ ID NO: 2671943 - RNA, 19 nt, Homo sapiens
  misc_RNA (1)...(19): siRNA sense strand
cagaggaggugguaucaga

SEQ ID NO: 2671944 - RNA, 19 nt, Homo sapiens
  misc_RNA (1)...(19): siRNA sense strand
caauagugagcauaagauu

SEQ ID NO: 2671945 - RNA, 19 nt, Homo sapiens
  misc_RNA (1)...(19): siRNA sense strand
gcugguugaaggagaucua

SEQ ID NO: 2671946 - RNA, 19 nt, Homo sapiens
  misc_RNA (1)...(19): siRNA sense strand
cagaacuggaggagccaau

SEQ ID NO: 2671947 - RNA, 19 nt, Homo sapiens
  misc_RNA (1)...(19): siRNA sense strand
caauuaaccucucugugaa

SEQ ID NO: 2671948 - RNA, 19 nt, Homo sapiens
  misc_RNA (1)...(19): siRNA sense strand
aacugaagccacagaagaa

SEQ ID NO: 2671949 - RNA, 19 nt, Homo sapiens
  misc_RNA (1)...(19): siRNA sense strand
gaacuggaggagccaauua

SEQ ID NO: 2671950 - RNA, 19 nt, Homo sapiens
  misc_RNA (1)...(19): siRNA sense strand
ccaauuaaccucucuguga

SEQ ID NO: 2671951 - RNA, 19 nt, Homo sapiens
  misc_RNA (1)...(19): siRNA sense strand
ugugagaaugccugcuaua

SEQ ID NO: 2671952 - RNA, 19 nt, Homo sapiens
  misc_RNA (1)...(19): siRNA sense strand
ccugaagaacacagacuca

SEQ ID NO: 2671953 - RNA, 19 nt, Homo sapiens
  misc_RNA (1)...(19): siRNA sense strand
ccagaagaagugugagaag

SEQ ID NO: 2671954 - RNA, 19 nt, Homo sapiens
  misc_RNA (1)...(19): siRNA sense strand
gacgacauauggagaauga

SEQ ID NO: 2671955 - RNA, 19 nt, Homo sapiens
  misc_RNA (1)...(19): siRNA sense strand
ccaaaagagugugagaauu

SEQ ID NO: 2671956 - RNA, 19 nt, Homo sapiens
  misc_RNA (1)...(19): siRNA sense strand
acagaagaaugaucaggau

SEQ ID NO: 2671957 - RNA, 19 nt, Homo sapiens
  misc_RNA (1)...(19): siRNA sense strand
agaagaagugugagaagcu

SEQ ID NO: 2671958 - RNA, 19 nt, Homo sapiens
  misc_RNA (1)...(19): siRNA sense strand
cagauuaucaagaggccca

SEQ ID NO: 2671959 - RNA, 19 nt, Homo sapiens
  misc_RNA (1)...(19): siRNA sense strand
ugucaaucauccggaggaa

SEQ ID NO: 2671960 - RNA, 19 nt, Homo sapiens
  misc_RNA (1)...(19): siRNA sense strand
ggcauuauuaccagauuau

SEQ ID NO: 2671961 - RNA, 19 nt, Homo sapiens
  misc_RNA (1)...(19): siRNA sense strand
gauaaugaccagagggaga

SEQ ID NO: 2671962 - RNA, 19 nt, Homo sapiens
  misc_RNA (1)...(19): siRNA sense strand
aggacaaccggcagagaaa

SEQ ID NO: 2671963 - RNA, 19 nt, Homo sapiens
  misc_RNA (1)...(19): siRNA sense strand
gagaauugggugagacaca

SEQ ID NO: 2671964 - RNA, 19 nt, Homo sapiens
  misc_RNA (1)...(19): siRNA sense strand
cagcauuaccagagacuga

SEQ ID NO: 2671965 - RNA, 19 nt, Homo sapiens
  misc_RNA (1)...(19): siRNA sense strand
agacauugcaggaguucaa

SEQ ID NO: 2671966 - RNA, 19 nt, Homo sapiens
  misc_RNA (1)...(19): siRNA sense strand
ugaaguagucccugaggaa

SEQ ID NO: 2671967 - RNA, 19 nt, Homo sapiens
  misc_RNA (1)...(19): siRNA sense strand
agaggaugcugguggaaaa

SEQ ID NO: 2671968 - RNA, 19 nt, Homo sapiens
  misc_RNA (1)...(19): siRNA sense strand
ggaaugagaucacaggaca

SEQ ID NO: 2671969 - RNA, 19 nt, Homo sapiens
  misc_RNA (1)...(19): siRNA sense strand
cugagaacguagaauggaa

SEQ ID NO: 2671970 - RNA, 19 nt, Homo sapiens
  misc_RNA (1)...(19): siRNA sense strand
ugacaugaagauuggacaa

SEQ ID NO: 2671971 - RNA, 19 nt, Homo sapiens
  misc_RNA (1)...(19): siRNA sense strand
ugaccaaacugcagcgcuu

SEQ ID NO: 2671972 - RNA, 19 nt, Homo sapiens
  misc_RNA (1)...(19): siRNA sense strand
ggacaagaggaaugggaac

SEQ ID NO: 2671973 - RNA, 19 nt, Homo sapiens
  misc_RNA (1)...(19): siRNA sense strand
augaagaggugacuagcaa

SEQ ID NO: 2671974 - RNA, 19 nt, Homo sapiens
  misc_RNA (1)...(19): siRNA sense strand
acaacaagcccaagcugaa

SEQ ID NO: 2671975 - RNA, 19 nt, Homo sapiens
  misc_RNA (1)...(19): siRNA sense strand
aaguacgacugaaggagaa

SEQ ID NO: 2671976 - RNA, 19 nt, Homo sapiens
  misc_RNA (1)...(19): siRNA sense strand
ucaagacugaugugggaaa

SEQ ID NO: 2671977 - RNA, 19 nt, Homo sapiens
  misc_RNA (1)...(19): siRNA sense strand
uguggaugaagcagagaaa

SEQ ID NO: 2671978 - RNA, 19 nt, Homo sapiens
  misc_RNA (1)...(19): siRNA sense strand
augagacauuagagaagaa

SEQ ID NO: 2671979 - RNA, 19 nt, Homo sapiens
  misc_RNA (1)...(19): siRNA sense strand
aaguagucccugaggaaaa

SEQ ID NO: 2671980 - RNA, 19 nt, Homo sapiens
  misc_RNA (1)...(19): siRNA sense strand
cggacaagaggaaugggaa

SEQ ID NO: 2671981 - RNA, 19 nt, Homo sapiens
  misc_RNA (1)...(19): siRNA sense strand
acaccugcguuuagauaau

SEQ ID NO: 2671982 - RNA, 19 nt, Homo sapiens
  misc_RNA (1)...(19): siRNA sense strand
aggagaauugggugagaca

SEQ ID NO: 2671983 - RNA, 19 nt, Homo sapiens
  misc_RNA (1)...(19): siRNA sense strand
cuuccauaagccugagaaa

SEQ ID NO: 2671984 - RNA, 19 nt, Homo sapiens
  misc_RNA (1)...(19): siRNA sense strand
gaugaagcagagaaagcaa

SEQ ID NO: 2671985 - RNA, 19 nt, Homo sapiens
  misc_RNA (1)...(19): siRNA sense strand
ggaaguuuguagagggccu

SEQ ID NO: 2671986 - RNA, 19 nt, Homo sapiens
  misc_RNA (1)...(19): siRNA sense strand
ucacagggguggaagagaa

SEQ ID NO: 2671987 - RNA, 19 nt, Homo sapiens
  misc_RNA (1)...(19): siRNA sense strand
ucauggacuacaagugaaa

SEQ ID NO: 2671988 - RNA, 19 nt, Homo sapiens
  misc_RNA (1)...(19): siRNA sense strand
gaaugagaucacaggacau

SEQ ID NO: 2671989 - RNA, 19 nt, Homo sapiens
  misc_RNA (1)...(19): siRNA sense strand
caagauuccuggagaccca

SEQ ID NO: 2671990 - RNA, 19 nt, Homo sapiens
  misc_RNA (1)...(19): siRNA sense strand
uggaaaggaucuggaguca

SEQ ID NO: 2671991 - RNA, 19 nt, Homo sapiens
  misc_RNA (1)...(19): siRNA sense strand
cuuucaaugccgucgauua

SEQ ID NO: 2671992 - RNA, 19 nt, Homo sapiens
  misc_RNA (1)...(19): siRNA sense strand
gaucuguauaucaggagaa

SEQ ID NO: 2671993 - RNA, 19 nt, Homo sapiens
  misc_RNA (1)...(19): siRNA sense strand
cagcauggaggauggugaa

SEQ ID NO: 2671994 - RNA, 19 nt, Homo sapiens
  misc_RNA (1)...(19): siRNA sense strand
aguaugugauggucaggaa

SEQ ID NO: 2671995 - RNA, 19 nt, Homo sapiens
  misc_RNA (1)...(19): siRNA sense strand
ggaggauggugaagacacu

SEQ ID NO: 2671996 - RNA, 19 nt, Homo sapiens
  misc_RNA (1)...(19): siRNA sense strand
agcaacaaguggacgaaaa

SEQ ID NO: 2671997 - RNA, 19 nt, Homo sapiens
  misc_RNA (1)...(19): siRNA sense strand
gugcgacuguccauggaaa

SEQ ID NO: 2671998 - RNA, 19 nt, Homo sapiens
  misc_RNA (1)...(19): siRNA sense strand
uaucaggagaauuggguga

SEQ ID NO: 2671999 - RNA, 19 nt, Homo sapiens
  misc_RNA (1)...(19): siRNA sense strand
ugagaaagagcgaggcagu

SEQ ID NO: 2672000 - RNA, 19 nt, Homo sapiens
  misc_RNA (1)...(19): siRNA sense strand
agaucaggcuguugaaugu

SEQ ID NO: 2672001 - RNA, 19 nt, Homo sapiens
  misc_RNA (1)...(19): siRNA sense strand
ccaagaugcaguaggaaug

SEQ ID NO: 2672002 - RNA, 19 nt, Homo sapiens
  misc_RNA (1)...(19): siRNA sense strand
gugggaaaggccagagcau

SEQ ID NO: 2672003 - RNA, 19 nt, Homo sapiens
  misc_RNA (1)...(19): siRNA sense strand
cauucaagacccaggcuga

SEQ ID NO: 2672004 - RNA, 19 nt, Homo sapiens
  misc_RNA (1)...(19): siRNA sense strand
cuguauaucaggagaauug

SEQ ID NO: 2672005 - RNA, 19 nt, Homo sapiens
  misc_RNA (1)...(19): siRNA sense strand
agauuggacaagggaaaua

SEQ ID NO: 2672006 - RNA, 19 nt, Homo sapiens
  misc_RNA (1)...(19): siRNA sense strand
agaaugaaguagucccuga

SEQ ID NO: 2672007 - RNA, 19 nt, Homo sapiens
  misc_RNA (1)...(19): siRNA sense strand
accaagaugcaguaggaau

SEQ ID NO: 2672008 - RNA, 19 nt, Homo sapiens
  misc_RNA (1)...(19): siRNA sense strand
ccaagaggaugcuggugga

SEQ ID NO: 2672009 - RNA, 19 nt, Homo sapiens
  misc_RNA (1)...(19): siRNA sense strand
cgacugaaggagaaaauuu

SEQ ID NO: 2672010 - RNA, 19 nt, Homo sapiens
  misc_RNA (1)...(19): siRNA sense strand
acauauacaacguacucua

SEQ ID NO: 2672011 - RNA, 19 nt, Homo sapiens
  misc_RNA (1)...(19): siRNA sense strand
ggguggagaauguguuuca

SEQ ID NO: 2672012 - RNA, 19 nt, Homo sapiens
  misc_RNA (1)...(19): siRNA sense strand
agagaaagcaauugagcug

SEQ ID NO: 2672013 - RNA, 19 nt, Homo sapiens
  misc_RNA (1)...(19): siRNA sense strand
gaccagagggagaaguaca

SEQ ID NO: 2672014 - RNA, 19 nt, Homo sapiens
  misc_RNA (1)...(19): siRNA sense strand
gggcauggaugauggaagc

SEQ ID NO: 2672015 - RNA, 19 nt, Homo sapiens
  misc_RNA (1)...(19): siRNA sense strand
gcagcauggaggaugguga

SEQ ID NO: 2672016 - RNA, 19 nt, Homo sapiens
  misc_RNA (1)...(19): siRNA sense strand
ggagaauguguuucagcuu

SEQ ID NO: 2672017 - RNA, 19 nt, Homo sapiens
  misc_RNA (1)...(19): siRNA sense strand
gcuuacuacuguccagauu

SEQ ID NO: 2672018 - RNA, 19 nt, Homo sapiens
  misc_RNA (1)...(19): siRNA sense strand
aggauguggcacugaucaa

SEQ ID NO: 2672019 - RNA, 19 nt, Homo sapiens
  misc_RNA (1)...(19): siRNA sense strand
auggaagccuggagcggau

SEQ ID NO: 2672020 - RNA, 19 nt, Homo sapiens
  misc_RNA (1)...(19): siRNA sense strand
ccagagaccaaguaccaau

SEQ ID NO: 2672021 - RNA, 19 nt, Homo sapiens
  misc_RNA (1)...(19): siRNA sense strand
cgcaauaagaccaagagga

SEQ ID NO: 2672022 - RNA, 19 nt, Homo sapiens
  misc_RNA (1)...(19): siRNA sense strand
gauaaugaccagagggaga

SEQ ID NO: 2672023 - RNA, 19 nt, Homo sapiens
  misc_RNA (1)...(19): siRNA sense strand
aggacaaccggcagagaaa

SEQ ID NO: 2672024 - RNA, 19 nt, Homo sapiens
  misc_RNA (1)...(19): siRNA sense strand
gagaauugggugagacaca

SEQ ID NO: 2672025 - RNA, 19 nt, Homo sapiens
  misc_RNA (1)...(19): siRNA sense strand
cagcauuaccagagacuga

SEQ ID NO: 2672026 - RNA, 19 nt, Homo sapiens
  misc_RNA (1)...(19): siRNA sense strand
agacauugcaggaguucaa

SEQ ID NO: 2672027 - RNA, 19 nt, Homo sapiens
  misc_RNA (1)...(19): siRNA sense strand
ugaaguagucccugaggaa

SEQ ID NO: 2672028 - RNA, 19 nt, Homo sapiens
  misc_RNA (1)...(19): siRNA sense strand
agaggaugcugguggaaaa

SEQ ID NO: 2672029 - RNA, 19 nt, Homo sapiens
  misc_RNA (1)...(19): siRNA sense strand
ggaaugagaucacaggaca

SEQ ID NO: 2672030 - RNA, 19 nt, Homo sapiens
  misc_RNA (1)...(19): siRNA sense strand
cugagaacguagaauggaa

SEQ ID NO: 2672031 - RNA, 19 nt, Homo sapiens
  misc_RNA (1)...(19): siRNA sense strand
ugacaugaagauuggacaa

SEQ ID NO: 2672032 - RNA, 19 nt, Homo sapiens
  misc_RNA (1)...(19): siRNA sense strand
ugaccaaacugcagcgcuu

SEQ ID NO: 2672033 - RNA, 19 nt, Homo sapiens
  misc_RNA (1)...(19): siRNA sense strand
ggacaagaggaaugggaac

SEQ ID NO: 2672034 - RNA, 19 nt, Homo sapiens
  misc_RNA (1)...(19): siRNA sense strand
augaagaggugacuagcaa

SEQ ID NO: 2672035 - RNA, 19 nt, Homo sapiens
  misc_RNA (1)...(19): siRNA sense strand
acaacaagcccaagcugaa

SEQ ID NO: 2672036 - RNA, 19 nt, Homo sapiens
  misc_RNA (1)...(19): siRNA sense strand
aaguacgacugaaggagaa

SEQ ID NO: 2672037 - RNA, 19 nt, Homo sapiens
  misc_RNA (1)...(19): siRNA sense strand
ucaagacugaugugggaaa

SEQ ID NO: 2672038 - RNA, 19 nt, Homo sapiens
  misc_RNA (1)...(19): siRNA sense strand
uguggaugaagcagagaaa

SEQ ID NO: 2672039 - RNA, 19 nt, Homo sapiens
  misc_RNA (1)...(19): siRNA sense strand
augagacauuagagaagaa

SEQ ID NO: 2672040 - RNA, 19 nt, Homo sapiens
  misc_RNA (1)...(19): siRNA sense strand
aaguagucccugaggaaaa

SEQ ID NO: 2672041 - RNA, 19 nt, Homo sapiens
  misc_RNA (1)...(19): siRNA sense strand
cggacaagaggaaugggaa

SEQ ID NO: 2672042 - RNA, 19 nt, Homo sapiens
  misc_RNA (1)...(19): siRNA sense strand
acaccugcguuuagauaau

SEQ ID NO: 2672043 - RNA, 19 nt, Homo sapiens
  misc_RNA (1)...(19): siRNA sense strand
aggagaauugggugagaca

SEQ ID NO: 2672044 - RNA, 19 nt, Homo sapiens
  misc_RNA (1)...(19): siRNA sense strand
cuuccauaagccugagaaa

SEQ ID NO: 2672045 - RNA, 19 nt, Homo sapiens
  misc_RNA (1)...(19): siRNA sense strand
gaugaagcagagaaagcaa

SEQ ID NO: 2672046 - RNA, 19 nt, Homo sapiens
  misc_RNA (1)...(19): siRNA sense strand
ggaaguuuguagagggccu

SEQ ID NO: 2672047 - RNA, 19 nt, Homo sapiens
  misc_RNA (1)...(19): siRNA sense strand
ucacagggguggaagagaa

SEQ ID NO: 2672048 - RNA, 19 nt, Homo sapiens
  misc_RNA (1)...(19): siRNA sense strand
ucauggacuacaagugaaa

SEQ ID NO: 2672049 - RNA, 19 nt, Homo sapiens
  misc_RNA (1)...(19): siRNA sense strand
gaaugagaucacaggacau

SEQ ID NO: 2672050 - RNA, 19 nt, Homo sapiens
  misc_RNA (1)...(19): siRNA sense strand
caagauuccuggagaccca

SEQ ID NO: 2672051 - RNA, 19 nt, Homo sapiens
  misc_RNA (1)...(19): siRNA sense strand
uggaaaggaucuggaguca

SEQ ID NO: 2672052 - RNA, 19 nt, Homo sapiens
  misc_RNA (1)...(19): siRNA sense strand
cuuucaaugccgucgauua

SEQ ID NO: 2672053 - RNA, 19 nt, Homo sapiens
  misc_RNA (1)...(19): siRNA sense strand
gaucuguauaucaggagaa

SEQ ID NO: 2672054 - RNA, 19 nt, Homo sapiens
  misc_RNA (1)...(19): siRNA sense strand
cagcauggaggauggugaa

SEQ ID NO: 2672055 - RNA, 19 nt, Homo sapiens
  misc_RNA (1)...(19): siRNA sense strand
aguaugugauggucaggaa

SEQ ID NO: 2672056 - RNA, 19 nt, Homo sapiens
  misc_RNA (1)...(19): siRNA sense strand
ggaggauggugaagacacu

SEQ ID NO: 2672057 - RNA, 19 nt, Homo sapiens
  misc_RNA (1)...(19): siRNA sense strand
agcaacaaguggacgaaaa

SEQ ID NO: 2672058 - RNA, 19 nt, Homo sapiens
  misc_RNA (1)...(19): siRNA sense strand
gugcgacuguccauggaaa

SEQ ID NO: 2672059 - RNA, 19 nt, Homo sapiens
  misc_RNA (1)...(19): siRNA sense strand
uaucaggagaauuggguga

SEQ ID NO: 2672060 - RNA, 19 nt, Homo sapiens
  misc_RNA (1)...(19): siRNA sense strand
ugagaaagagcgaggcagu

SEQ ID NO: 2672061 - RNA, 19 nt, Homo sapiens
  misc_RNA (1)...(19): siRNA sense strand
agaucaggcuguugaaugu

SEQ ID NO: 2672062 - RNA, 19 nt, Homo sapiens
  misc_RNA (1)...(19): siRNA sense strand
ccaagaugcaguaggaaug

SEQ ID NO: 2672063 - RNA, 19 nt, Homo sapiens
  misc_RNA (1)...(19): siRNA sense strand
gugggaaaggccagagcau

SEQ ID NO: 2672064 - RNA, 19 nt, Homo sapiens
  misc_RNA (1)...(19): siRNA sense strand
cauucaagacccaggcuga

SEQ ID NO: 2672065 - RNA, 19 nt, Homo sapiens
  misc_RNA (1)...(19): siRNA sense strand
cuguauaucaggagaauug

SEQ ID NO: 2672066 - RNA, 19 nt, Homo sapiens
  misc_RNA (1)...(19): siRNA sense strand
agauuggacaagggaaaua

SEQ ID NO: 2672067 - RNA, 19 nt, Homo sapiens
  misc_RNA (1)...(19): siRNA sense strand
agaaugaaguagucccuga

SEQ ID NO: 2672068 - RNA, 19 nt, Homo sapiens
  misc_RNA (1)...(19): siRNA sense strand
accaagaugcaguaggaau

SEQ ID NO: 2672069 - RNA, 19 nt, Homo sapiens
  misc_RNA (1)...(19): siRNA sense strand
ccaagaggaugcuggugga

SEQ ID NO: 2672070 - RNA, 19 nt, Homo sapiens
  misc_RNA (1)...(19): siRNA sense strand
cgacugaaggagaaaauuu

SEQ ID NO: 2672071 - RNA, 19 nt, Homo sapiens
  misc_RNA (1)...(19): siRNA sense strand
acauauacaacguacucua

SEQ ID NO: 2672072 - RNA, 19 nt, Homo sapiens
  misc_RNA (1)...(19): siRNA sense strand
ggguggagaauguguuuca

SEQ ID NO: 2672073 - RNA, 19 nt, Homo sapiens
  misc_RNA (1)...(19): siRNA sense strand
agagaaagcaauugagcug

SEQ ID NO: 2672074 - RNA, 19 nt, Homo sapiens
  misc_RNA (1)...(19): siRNA sense strand
gaccagagggagaaguaca

SEQ ID NO: 2672075 - RNA, 19 nt, Homo sapiens
  misc_RNA (1)...(19): siRNA sense strand
gggcauggaugauggaagc

SEQ ID NO: 2672076 - RNA, 19 nt, Homo sapiens
  misc_RNA (1)...(19): siRNA sense strand
gcagcauggaggaugguga

SEQ ID NO: 2672077 - RNA, 19 nt, Homo sapiens
  misc_RNA (1)...(19): siRNA sense strand
ggagaauguguuucagcuu

SEQ ID NO: 2672078 - RNA, 19 nt, Homo sapiens
  misc_RNA (1)...(19): siRNA sense strand
gcuuacuacuguccagauu

SEQ ID NO: 2672079 - RNA, 19 nt, Homo sapiens
  misc_RNA (1)...(19): siRNA sense strand
aggauguggcacugaucaa

SEQ ID NO: 2672080 - RNA, 19 nt, Homo sapiens
  misc_RNA (1)...(19): siRNA sense strand
auggaagccuggagcggau

SEQ ID NO: 2672081 - RNA, 19 nt, Homo sapiens
  misc_RNA (1)...(19): siRNA sense strand
ccagagaccaaguaccaau

SEQ ID NO: 2672082 - RNA, 19 nt, Homo sapiens
  misc_RNA (1)...(19): siRNA sense strand
cgcaauaagaccaagagga

SEQ ID NO: 2672083 - RNA, 19 nt, Homo sapiens
  misc_RNA (1)...(19): siRNA sense strand
cugaauagagguugcagua

SEQ ID NO: 2672084 - RNA, 19 nt, Homo sapiens
  misc_RNA (1)...(19): siRNA sense strand
augaagguucccagagaua

SEQ ID NO: 2672085 - RNA, 19 nt, Homo sapiens
  misc_RNA (1)...(19): siRNA sense strand
augccaaggcucuaggaaa

SEQ ID NO: 2672086 - RNA, 19 nt, Homo sapiens
  misc_RNA (1)...(19): siRNA sense strand
gaauagagguugcaguacu

SEQ ID NO: 2672087 - RNA, 19 nt, Homo sapiens
  misc_RNA (1)...(19): siRNA sense strand
acuuacaacagcaggagaa

SEQ ID NO: 2672088 - RNA, 19 nt, Homo sapiens
  misc_RNA (1)...(19): siRNA sense strand
gagauauggaugaugccaa

SEQ ID NO: 2672089 - RNA, 19 nt, Homo sapiens
  misc_RNA (1)...(19): siRNA sense strand
ugacaggagccuaggccuu

SEQ ID NO: 2672090 - RNA, 19 nt, Homo sapiens
  misc_RNA (1)...(19): siRNA sense strand
agugaagaagaaagaguga

SEQ ID NO: 2672091 - RNA, 19 nt, Homo sapiens
  misc_RNA (1)...(19): siRNA sense strand
agagaccaccagaaggaaa

SEQ ID NO: 2672092 - RNA, 19 nt, Homo sapiens
  misc_RNA (1)...(19): siRNA sense strand
ugaacgucauagagaacau

SEQ ID NO: 2672093 - RNA, 19 nt, Homo sapiens
  misc_RNA (1)...(19): siRNA sense strand
guaaggagccugcaacaga

SEQ ID NO: 2672094 - RNA, 19 nt, Homo sapiens
  misc_RNA (1)...(19): siRNA sense strand
aggcagagucgccgaacga

SEQ ID NO: 2672095 - RNA, 19 nt, Homo sapiens
  misc_RNA (1)...(19): siRNA sense strand
gagaccaccagaaggaaaa

SEQ ID NO: 2672096 - RNA, 19 nt, Homo sapiens
  misc_RNA (1)...(19): siRNA sense strand
ucugacagcuuccugaaua

SEQ ID NO: 2672097 - RNA, 19 nt, Homo sapiens
  misc_RNA (1)...(19): siRNA sense strand
cguaguaaggagccugcaa

SEQ ID NO: 2672098 - RNA, 19 nt, Homo sapiens
  misc_RNA (1)...(19): siRNA sense strand
acauaagcuuguaggaaua

SEQ ID NO: 2672099 - RNA, 19 nt, Homo sapiens
  misc_RNA (1)...(19): siRNA sense strand
agauauagcaggagaccaa

SEQ ID NO: 2672100 - RNA, 19 nt, Homo sapiens
  misc_RNA (1)...(19): siRNA sense strand
caaaugaugugaaaggaaa

SEQ ID NO: 2672101 - RNA, 19 nt, Homo sapiens
  misc_RNA (1)...(19): siRNA sense strand
ccucauaccucuugacauu

SEQ ID NO: 2672102 - RNA, 19 nt, Homo sapiens
  misc_RNA (1)...(19): siRNA sense strand
gguaugaaauggaagaaga

SEQ ID NO: 2672103 - RNA, 19 nt, Homo sapiens
  misc_RNA (1)...(19): siRNA sense strand
guucaaagaccguuaacaa

SEQ ID NO: 2672104 - RNA, 19 nt, Homo sapiens
  misc_RNA (1)...(19): siRNA sense strand
guacagaggcuuaggggaa

SEQ ID NO: 2672105 - RNA, 19 nt, Homo sapiens
  misc_RNA (1)...(19): siRNA sense strand
gacauaagcuuguaggaau

SEQ ID NO: 2672106 - RNA, 19 nt, Homo sapiens
  misc_RNA (1)...(19): siRNA sense strand
gagaagaaaucaagaccca

SEQ ID NO: 2672107 - RNA, 19 nt, Homo sapiens
  misc_RNA (1)...(19): siRNA sense strand
cuguaaugcagaugauaua

SEQ ID NO: 2672108 - RNA, 19 nt, Homo sapiens
  misc_RNA (1)...(19): siRNA sense strand
aaacaugacaagaaagcaa

SEQ ID NO: 2672109 - RNA, 19 nt, Homo sapiens
  misc_RNA (1)...(19): siRNA sense strand
aagaggacuuagaggaaau

SEQ ID NO: 2672110 - RNA, 19 nt, Homo sapiens
  misc_RNA (1)...(19): siRNA sense strand
gcaccauuauguuagaaua

SEQ ID NO: 2672111 - RNA, 19 nt, Homo sapiens
  misc_RNA (1)...(19): siRNA sense strand
augaauuccucgaguacaa

SEQ ID NO: 2672112 - RNA, 19 nt, Homo sapiens
  misc_RNA (1)...(19): siRNA sense strand
gaagaaaucagaagagcga

SEQ ID NO: 2672113 - RNA, 19 nt, Homo sapiens
  misc_RNA (1)...(19): siRNA sense strand
gaaauuaaggguaguguga

SEQ ID NO: 2672114 - RNA, 19 nt, Homo sapiens
  misc_RNA (1)...(19): siRNA sense strand
aguuugaaccaguggaaau

SEQ ID NO: 2672115 - RNA, 19 nt, Homo sapiens
  misc_RNA (1)...(19): siRNA sense strand
aaagauuucugguggcuua

SEQ ID NO: 2672116 - RNA, 19 nt, Homo sapiens
  misc_RNA (1)...(19): siRNA sense strand
caauaaacguuuuggcuau

SEQ ID NO: 2672117 - RNA, 19 nt, Homo sapiens
  misc_RNA (1)...(19): siRNA sense strand
gaaaaggagaaaagaggaa

SEQ ID NO: 2672118 - RNA, 19 nt, Homo sapiens
  misc_RNA (1)...(19): siRNA sense strand
ucaaagaagaggcaggcaa

SEQ ID NO: 2672119 - RNA, 19 nt, Homo sapiens
  misc_RNA (1)...(19): siRNA sense strand
ggaauaacacccuuuguaa

SEQ ID NO: 2672120 - RNA, 19 nt, Homo sapiens
  misc_RNA (1)...(19): siRNA sense strand
uggaagaagagaaugaauu

SEQ ID NO: 2672121 - RNA, 19 nt, Homo sapiens
  misc_RNA (1)...(19): siRNA sense strand
aaauggaagaagagaauga

SEQ ID NO: 2672122 - RNA, 19 nt, Homo sapiens
  misc_RNA (1)...(19): siRNA sense strand
augaaauggaagaagagaa

SEQ ID NO: 2672123 - RNA, 19 nt, Homo sapiens
  misc_RNA (1)...(19): siRNA sense strand
guacaaucacgcagaguca

SEQ ID NO: 2672124 - RNA, 19 nt, Homo sapiens
  misc_RNA (1)...(19): siRNA sense strand
gcaaacaguuaguagcuca

SEQ ID NO: 2672125 - RNA, 19 nt, Homo sapiens
  misc_RNA (1)...(19): siRNA sense strand
ggguaauguuaaucacgaa

SEQ ID NO: 2672126 - RNA, 19 nt, Homo sapiens
  misc_RNA (1)...(19): siRNA sense strand
acaaaugaugugaaaggaa

SEQ ID NO: 2672127 - RNA, 19 nt, Homo sapiens
  misc_RNA (1)...(19): siRNA sense strand
gcuauggccaagaggacaa

SEQ ID NO: 2672128 - RNA, 19 nt, Homo sapiens
  misc_RNA (1)...(19): siRNA sense strand
ggaguaugaggaagagcaa

SEQ ID NO: 2672129 - RNA, 19 nt, Homo sapiens
  misc_RNA (1)...(19): siRNA sense strand
cucccaaaguugaaagcaa

SEQ ID NO: 2672130 - RNA, 19 nt, Homo sapiens
  misc_RNA (1)...(19): siRNA sense strand
guacagaaaggcaccauua

SEQ ID NO: 2672131 - RNA, 19 nt, Homo sapiens
  misc_RNA (1)...(19): siRNA sense strand
aacauggacuucagagaaa

SEQ ID NO: 2672132 - RNA, 19 nt, Homo sapiens
  misc_RNA (1)...(19): siRNA sense strand
aguaugaggaagagcaaga

SEQ ID NO: 2672133 - RNA, 19 nt, Homo sapiens
  misc_RNA (1)...(19): siRNA sense strand
gaagaaauauccaagcaca

SEQ ID NO: 2672134 - RNA, 19 nt, Homo sapiens
  misc_RNA (1)...(19): siRNA sense strand
ccuugauccugaugagcua

SEQ ID NO: 2672135 - RNA, 19 nt, Homo sapiens
  misc_RNA (1)...(19): siRNA sense strand
gagcauucuuacucauuaa

SEQ ID NO: 2672136 - RNA, 19 nt, Homo sapiens
  misc_RNA (1)...(19): siRNA sense strand
aagcaagagcuauggccaa

SEQ ID NO: 2672137 - RNA, 19 nt, Homo sapiens
  misc_RNA (1)...(19): siRNA sense strand
ggaaguaacaugugaggcu

SEQ ID NO: 2672138 - RNA, 19 nt, Homo sapiens
  misc_RNA (1)...(19): siRNA sense strand
ugucacagcugaaagauuu

SEQ ID NO: 2672139 - RNA, 19 nt, Homo sapiens
  misc_RNA (1)...(19): siRNA sense strand
ggauugagaacuugaaaau

SEQ ID NO: 2672140 - RNA, 19 nt, Homo sapiens
  misc_RNA (1)...(19): siRNA sense strand
uggcuuuaguguaagacaa

SEQ ID NO: 2672141 - RNA, 19 nt, Homo sapiens
  misc_RNA (1)...(19): siRNA sense strand
uuaggaaguaggagggauu

SEQ ID NO: 2672142 - RNA, 19 nt, Homo sapiens
  misc_RNA (1)...(19): siRNA sense strand
aggaagaugacgaugauga

SEQ ID NO: 2672143 - RNA, 19 nt, Homo sapiens
  misc_RNA (1)...(19): siRNA sense strand
ccauauugcacuuugauuu

SEQ ID NO: 2672144 - RNA, 19 nt, Homo sapiens
  misc_RNA (1)...(19): siRNA sense strand
ggaaggaagccaagucuca

SEQ ID NO: 2672145 - RNA, 19 nt, Homo sapiens
  misc_RNA (1)...(19): siRNA sense strand
agcagaaggaagaagcaaa

SEQ ID NO: 2672146 - RNA, 19 nt, Homo sapiens
  misc_RNA (1)...(19): siRNA sense strand
uauguuggcuuuaguguaa

SEQ ID NO: 2672147 - RNA, 19 nt, Homo sapiens
  misc_RNA (1)...(19): siRNA sense strand
ucucaagaacugucagcaa

SEQ ID NO: 2672148 - RNA, 19 nt, Homo sapiens
  misc_RNA (1)...(19): siRNA sense strand
gagcgagacuccaugucaa

SEQ ID NO: 2672149 - RNA, 19 nt, Homo sapiens
  misc_RNA (1)...(19): siRNA sense strand
cagcuugggaccugggcaa

SEQ ID NO: 2672150 - RNA, 19 nt, Homo sapiens
  misc_RNA (1)...(19): siRNA sense strand
uaauuuagguggcuaggaa

SEQ ID NO: 2672151 - RNA, 19 nt, Homo sapiens
  misc_RNA (1)...(19): siRNA sense strand
uuacaaugguagcagaaaa

SEQ ID NO: 2672152 - RNA, 19 nt, Homo sapiens
  misc_RNA (1)...(19): siRNA sense strand
uggccaacauggugugaga

SEQ ID NO: 2672153 - RNA, 19 nt, Homo sapiens
  misc_RNA (1)...(19): siRNA sense strand
gcgagaauuccuugaacga

SEQ ID NO: 2672154 - RNA, 19 nt, Homo sapiens
  misc_RNA (1)...(19): siRNA sense strand
ugucaguggcccugggaga

SEQ ID NO: 2672155 - RNA, 19 nt, Homo sapiens
  misc_RNA (1)...(19): siRNA sense strand
gcaaagagcuuaagacugg

SEQ ID NO: 2672156 - RNA, 19 nt, Homo sapiens
  misc_RNA (1)...(19): siRNA sense strand
gagacgugaagaagaagaa

SEQ ID NO: 2672157 - RNA, 19 nt, Homo sapiens
  misc_RNA (1)...(19): siRNA sense strand
ggaucaugcuggaaggaag

SEQ ID NO: 2672158 - RNA, 19 nt, Homo sapiens
  misc_RNA (1)...(19): siRNA sense strand
uuacaugugugccgugaaa

SEQ ID NO: 2672159 - RNA, 19 nt, Homo sapiens
  misc_RNA (1)...(19): siRNA sense strand
caacauggacuucagagaa

SEQ ID NO: 2672160 - RNA, 19 nt, Homo sapiens
  misc_RNA (1)...(19): siRNA sense strand
uccaagcacauuagagaaa

SEQ ID NO: 2672161 - RNA, 19 nt, Homo sapiens
  misc_RNA (1)...(19): siRNA sense strand
cuuugaagaaacuggagua

SEQ ID NO: 2672162 - RNA, 19 nt, Homo sapiens
  misc_RNA (1)...(19): siRNA sense strand
acgcagagucagagcagga

SEQ ID NO: 2672163 - RNA, 19 nt, Homo sapiens
  misc_RNA (1)...(19): siRNA sense strand
gugaagaagaagaaaugca

SEQ ID NO: 2672164 - RNA, 19 nt, Homo sapiens
  misc_RNA (1)...(19): siRNA sense strand
agaugugccuuuuggguaa

SEQ ID NO: 2672165 - RNA, 19 nt, Homo sapiens
  misc_RNA (1)...(19): siRNA sense strand
aaaagcagcuauugguaaa

SEQ ID NO: 2672166 - RNA, 19 nt, Homo sapiens
  misc_RNA (1)...(19): siRNA sense strand
agaacaaauacuuggcaaa

SEQ ID NO: 2672167 - RNA, 19 nt, Homo sapiens
  misc_RNA (1)...(19): siRNA sense strand
ggacaaaauacgaacagaa

SEQ ID NO: 2672168 - RNA, 19 nt, Homo sapiens
  misc_RNA (1)...(19): siRNA sense strand
gaagaaaugcuaaaggaca

SEQ ID NO: 2672169 - RNA, 19 nt, Homo sapiens
  misc_RNA (1)...(19): siRNA sense strand
cagugagugaugugaauaa

SEQ ID NO: 2672170 - RNA, 19 nt, Homo sapiens
  misc_RNA (1)...(19): siRNA sense strand
gaacagaaagcuaccgaga

SEQ ID NO: 2672171 - RNA, 19 nt, Homo sapiens
  misc_RNA (1)...(19): siRNA sense strand
gggaugaugucuauggcuu

SEQ ID NO: 2672172 - RNA, 19 nt, Homo sapiens
  misc_RNA (1)...(19): siRNA sense strand
aagaacaaauacuuggcaa

SEQ ID NO: 2672173 - RNA, 19 nt, Homo sapiens
  misc_RNA (1)...(19): siRNA sense strand
gguucuuggaguugaucaa

SEQ ID NO: 2672174 - RNA, 19 nt, Homo sapiens
  misc_RNA (1)...(19): siRNA sense strand
cugaaaaucacaaggacau

SEQ ID NO: 2672175 - RNA, 19 nt, Homo sapiens
  misc_RNA (1)...(19): siRNA sense strand
cuggaaacaaacaguauuu

SEQ ID NO: 2672176 - RNA, 19 nt, Homo sapiens
  misc_RNA (1)...(19): siRNA sense strand
ccugggaggaugaggacga

SEQ ID NO: 2672177 - RNA, 19 nt, Homo sapiens
  misc_RNA (1)...(19): siRNA sense strand
aaauacgaacagaaagcua

SEQ ID NO: 2672178 - RNA, 19 nt, Homo sapiens
  misc_RNA (1)...(19): siRNA sense strand
acuguaagucugagcauca

SEQ ID NO: 2672179 - RNA, 19 nt, Homo sapiens
  misc_RNA (1)...(19): siRNA sense strand
ggauguuggguguggaacu

SEQ ID NO: 2672180 - RNA, 19 nt, Homo sapiens
  misc_RNA (1)...(19): siRNA sense strand
gcauuaugggauacaugaa

SEQ ID NO: 2672181 - RNA, 19 nt, Homo sapiens
  misc_RNA (1)...(19): siRNA sense strand
aggaugaggacgaugcaga

SEQ ID NO: 2672182 - RNA, 19 nt, Homo sapiens
  misc_RNA (1)...(19): siRNA sense strand
ccuugugguauuaagcaua

SEQ ID NO: 2672183 - RNA, 19 nt, Homo sapiens
  misc_RNA (1)...(19): siRNA sense strand
agccaguauuagaagauga

SEQ ID NO: 2672184 - RNA, 19 nt, Homo sapiens
  misc_RNA (1)...(19): siRNA sense strand
ggaugaggacgaugcagau

SEQ ID NO: 2672185 - RNA, 19 nt, Homo sapiens
  misc_RNA (1)...(19): siRNA sense strand
caauggacucagugaaaau

SEQ ID NO: 2672186 - RNA, 19 nt, Homo sapiens
  misc_RNA (1)...(19): siRNA sense strand
cuguggagaaugaggagga

SEQ ID NO: 2672187 - RNA, 19 nt, Homo sapiens
  misc_RNA (1)...(19): siRNA sense strand
uaucugaguggaugggcua

SEQ ID NO: 2672188 - RNA, 19 nt, Homo sapiens
  misc_RNA (1)...(19): siRNA sense strand
gguucauaaacauggacuu

SEQ ID NO: 2672189 - RNA, 19 nt, Homo sapiens
  misc_RNA (1)...(19): siRNA sense strand
gaguauuugaagccaguau

SEQ ID NO: 2672190 - RNA, 19 nt, Homo sapiens
  misc_RNA (1)...(19): siRNA sense strand
agaaaugcuaaaggacaaa

SEQ ID NO: 2672191 - RNA, 19 nt, Homo sapiens
  misc_RNA (1)...(19): siRNA sense strand
uguuagauucuguccuuua

SEQ ID NO: 2672192 - RNA, 19 nt, Homo sapiens
  misc_RNA (1)...(19): siRNA sense strand
ccugaaaaucacaaggaca

SEQ ID NO: 2672193 - RNA, 19 nt, Homo sapiens
  misc_RNA (1)...(19): siRNA sense strand
agaacaaauacuuggcaaa

SEQ ID NO: 2672194 - RNA, 19 nt, Homo sapiens
  misc_RNA (1)...(19): siRNA sense strand
ggacaaaauacgaacagaa

SEQ ID NO: 2672195 - RNA, 19 nt, Homo sapiens
  misc_RNA (1)...(19): siRNA sense strand
gaagaaaugcuaaaggaca

SEQ ID NO: 2672196 - RNA, 19 nt, Homo sapiens
  misc_RNA (1)...(19): siRNA sense strand
cagugagugaugugaauaa

SEQ ID NO: 2672197 - RNA, 19 nt, Homo sapiens
  misc_RNA (1)...(19): siRNA sense strand
gaacagaaagcuaccgaga

SEQ ID NO: 2672198 - RNA, 19 nt, Homo sapiens
  misc_RNA (1)...(19): siRNA sense strand
gggaugaugucuauggcuu

SEQ ID NO: 2672199 - RNA, 19 nt, Homo sapiens
  misc_RNA (1)...(19): siRNA sense strand
aagaacaaauacuuggcaa

SEQ ID NO: 2672200 - RNA, 19 nt, Homo sapiens
  misc_RNA (1)...(19): siRNA sense strand
gguucuuggaguugaucaa

SEQ ID NO: 2672201 - RNA, 19 nt, Homo sapiens
  misc_RNA (1)...(19): siRNA sense strand
cuggaaacaaacaguauuu

SEQ ID NO: 2672202 - RNA, 19 nt, Homo sapiens
  misc_RNA (1)...(19): siRNA sense strand
ccugggaggaugaggacga

SEQ ID NO: 2672203 - RNA, 19 nt, Homo sapiens
  misc_RNA (1)...(19): siRNA sense strand
aaauacgaacagaaagcua

SEQ ID NO: 2672204 - RNA, 19 nt, Homo sapiens
  misc_RNA (1)...(19): siRNA sense strand
acuguaagucugagcauca

SEQ ID NO: 2672205 - RNA, 19 nt, Homo sapiens
  misc_RNA (1)...(19): siRNA sense strand
ggauguuggguguggaacu

SEQ ID NO: 2672206 - RNA, 19 nt, Homo sapiens
  misc_RNA (1)...(19): siRNA sense strand
aggaugaggacgaugcaga

SEQ ID NO: 2672207 - RNA, 19 nt, Homo sapiens
  misc_RNA (1)...(19): siRNA sense strand
gcauuaugggauacaugaa

SEQ ID NO: 2672208 - RNA, 19 nt, Homo sapiens
  misc_RNA (1)...(19): siRNA sense strand
ccuugugguauuaagcaua

SEQ ID NO: 2672209 - RNA, 19 nt, Homo sapiens
  misc_RNA (1)...(19): siRNA sense strand
caauggacucagugaaaau

SEQ ID NO: 2672210 - RNA, 19 nt, Homo sapiens
  misc_RNA (1)...(19): siRNA sense strand
ggaugaggacgaugcagau

SEQ ID NO: 2672211 - RNA, 19 nt, Homo sapiens
  misc_RNA (1)...(19): siRNA sense strand
cuguggagaaugaggagga

SEQ ID NO: 2672212 - RNA, 19 nt, Homo sapiens
  misc_RNA (1)...(19): siRNA sense strand
uaucugaguggaugggcua

SEQ ID NO: 2672213 - RNA, 19 nt, Homo sapiens
  misc_RNA (1)...(19): siRNA sense strand
gguucauaaacauggacuu

SEQ ID NO: 2672214 - RNA, 19 nt, Homo sapiens
  misc_RNA (1)...(19): siRNA sense strand
gaguauuugaagccaguau

SEQ ID NO: 2672215 - RNA, 19 nt, Homo sapiens
  misc_RNA (1)...(19): siRNA sense strand
agaaaugcuaaaggacaaa

SEQ ID NO: 2672216 - RNA, 19 nt, Homo sapiens
  misc_RNA (1)...(19): siRNA sense strand
uguuagauucuguccuuua

SEQ ID NO: 2672217 - RNA, 19 nt, Homo sapiens
  misc_RNA (1)...(19): siRNA sense strand
agaaagacgcagaguuaaa

SEQ ID NO: 2672218 - RNA, 19 nt, Homo sapiens
  misc_RNA (1)...(19): siRNA sense strand
cgagaugggauuaggcaaa

SEQ ID NO: 2672219 - RNA, 19 nt, Homo sapiens
  misc_RNA (1)...(19): siRNA sense strand
ccuauuaaggagagugaua

SEQ ID NO: 2672220 - RNA, 19 nt, Homo sapiens
  misc_RNA (1)...(19): siRNA sense strand
ggaaagaagaaaagaguuu

SEQ ID NO: 2672221 - RNA, 19 nt, Homo sapiens
  misc_RNA (1)...(19): siRNA sense strand
uagcauagguguuuggcaa

SEQ ID NO: 2672222 - RNA, 19 nt, Homo sapiens
  misc_RNA (1)...(19): siRNA sense strand
gggcaggaguggaaaggau

SEQ ID NO: 2672223 - RNA, 19 nt, Homo sapiens
  misc_RNA (1)...(19): siRNA sense strand
ugugauuauuggagacuaa

SEQ ID NO: 2672224 - RNA, 19 nt, Homo sapiens
  misc_RNA (1)...(19): siRNA sense strand
gguacagagauuacagaua

SEQ ID NO: 2672225 - RNA, 19 nt, Homo sapiens
  misc_RNA (1)...(19): siRNA sense strand
cuggagaaguacugggaga

SEQ ID NO: 2672226 - RNA, 19 nt, Homo sapiens
  misc_RNA (1)...(19): siRNA sense strand
gcauagaagaugggaagaa

SEQ ID NO: 2672227 - RNA, 19 nt, Homo sapiens
  misc_RNA (1)...(19): siRNA sense strand
augcugaagucuugggaau

SEQ ID NO: 2672228 - RNA, 19 nt, Homo sapiens
  misc_RNA (1)...(19): siRNA sense strand
gaacauaacacaagcagca

SEQ ID NO: 2672229 - RNA, 19 nt, Homo sapiens
  misc_RNA (1)...(19): siRNA sense strand
ggacaaacucugagaagcu

SEQ ID NO: 2672230 - RNA, 19 nt, Homo sapiens
  misc_RNA (1)...(19): siRNA sense strand
gaagaaaagguuugggauu

SEQ ID NO: 2672231 - RNA, 19 nt, Homo sapiens
  misc_RNA (1)...(19): siRNA sense strand
uggagagaaucaagagaga

SEQ ID NO: 2672232 - RNA, 19 nt, Homo sapiens
  misc_RNA (1)...(19): siRNA sense strand
aguuggaaauagaagacaa

SEQ ID NO: 2672233 - RNA, 19 nt, Homo sapiens
  misc_RNA (1)...(19): siRNA sense strand
gggaaagaggcguggaaac

SEQ ID NO: 2672234 - RNA, 19 nt, Homo sapiens
  misc_RNA (1)...(19): siRNA sense strand
aguccgaggaggaggagaa

SEQ ID NO: 2672235 - RNA, 19 nt, Homo sapiens
  misc_RNA (1)...(19): siRNA sense strand
guuggaaauagaagacaaa

SEQ ID NO: 2672236 - RNA, 19 nt, Homo sapiens
  misc_RNA (1)...(19): siRNA sense strand
ccagagggcaggaguggaa

SEQ ID NO: 2672237 - RNA, 19 nt, Homo sapiens
  misc_RNA (1)...(19): siRNA sense strand
aagauguuguggagagaau

SEQ ID NO: 2672238 - RNA, 19 nt, Homo sapiens
  misc_RNA (1)...(19): siRNA sense strand
ggagaagugaagaguguga

SEQ ID NO: 2672239 - RNA, 19 nt, Homo sapiens
  misc_RNA (1)...(19): siRNA sense strand
ccuuagaaguccagcagca

SEQ ID NO: 2672240 - RNA, 19 nt, Homo sapiens
  misc_RNA (1)...(19): siRNA sense strand
ggauugaaagacugcuaaa

SEQ ID NO: 2672241 - RNA, 19 nt, Homo sapiens
  misc_RNA (1)...(19): siRNA sense strand
gcuuauuaucaauggaaca

SEQ ID NO: 2672242 - RNA, 19 nt, Homo sapiens
  misc_RNA (1)...(19): siRNA sense strand
aauugaaugcagugacuaa

SEQ ID NO: 2672243 - RNA, 19 nt, Homo sapiens
  misc_RNA (1)...(19): siRNA sense strand
aagggaaguucguaggcua

SEQ ID NO: 2672244 - RNA, 19 nt, Homo sapiens
  misc_RNA (1)...(19): siRNA sense strand
aguuaaaggcggaaagaag

SEQ ID NO: 2672245 - RNA, 19 nt, Homo sapiens
  misc_RNA (1)...(19): siRNA sense strand
uaaaagagaacuugggaau

SEQ ID NO: 2672246 - RNA, 19 nt, Homo sapiens
  misc_RNA (1)...(19): siRNA sense strand
guuaaaggcggaaagaaga

SEQ ID NO: 2672247 - RNA, 19 nt, Homo sapiens
  misc_RNA (1)...(19): siRNA sense strand
gagaaggaggccugcagaa

SEQ ID NO: 2672248 - RNA, 19 nt, Homo sapiens
  misc_RNA (1)...(19): siRNA sense strand
ggaagauggaagaacuuau

SEQ ID NO: 2672249 - RNA, 19 nt, Homo sapiens
  misc_RNA (1)...(19): siRNA sense strand
cugaugacgagaauaaaua

SEQ ID NO: 2672250 - RNA, 19 nt, Homo sapiens
  misc_RNA (1)...(19): siRNA sense strand
acuugcagguacagagauu

SEQ ID NO: 2672251 - RNA, 19 nt, Homo sapiens
  misc_RNA (1)...(19): siRNA sense strand
cagcgaaggggaaaggaaa

SEQ ID NO: 2672252 - RNA, 19 nt, Homo sapiens
  misc_RNA (1)...(19): siRNA sense strand
acgcagaguuaaaggcgga

SEQ ID NO: 2672253 - RNA, 19 nt, Homo sapiens
  misc_RNA (1)...(19): siRNA sense strand
cugcuaaacucuaacacuu

SEQ ID NO: 2672254 - RNA, 19 nt, Homo sapiens
  misc_RNA (1)...(19): siRNA sense strand
cuuccuuacuccucagaua

SEQ ID NO: 2672255 - RNA, 19 nt, Homo sapiens
  misc_RNA (1)...(19): siRNA sense strand
cuccugaugacgagaauaa

SEQ ID NO: 2672256 - RNA, 19 nt, Homo sapiens
  misc_RNA (1)...(19): siRNA sense strand
augucaugauugaggaaaa

SEQ ID NO: 2672257 - RNA, 19 nt, Homo sapiens
  misc_RNA (1)...(19): siRNA sense strand
gaaacaacgacaagccaga

SEQ ID NO: 2672258 - RNA, 19 nt, Homo sapiens
  misc_RNA (1)...(19): siRNA sense strand
ggaaaggaaagcugccaga

SEQ ID NO: 2672259 - RNA, 19 nt, Homo sapiens
  misc_RNA (1)...(19): siRNA sense strand
ccauuaacgagcuggcgaa

SEQ ID NO: 2672260 - RNA, 19 nt, Homo sapiens
  misc_RNA (1)...(19): siRNA sense strand
acaaagcacagcuggcuaa

SEQ ID NO: 2672261 - RNA, 19 nt, Homo sapiens
  misc_RNA (1)...(19): siRNA sense strand
ggaucaugaccuugaaagu

SEQ ID NO: 2672262 - RNA, 19 nt, Homo sapiens
  misc_RNA (1)...(19): siRNA sense strand
gaucggaggaggaggauuc

SEQ ID NO: 2672263 - RNA, 19 nt, Homo sapiens
  misc_RNA (1)...(19): siRNA sense strand
ccgagaugggauuaggcaa

SEQ ID NO: 2672264 - RNA, 19 nt, Homo sapiens
  misc_RNA (1)...(19): siRNA sense strand
caguaugguagcuguaauu

SEQ ID NO: 2672265 - RNA, 19 nt, Homo sapiens
  misc_RNA (1)...(19): siRNA sense strand
uguagagauucgaguggau

SEQ ID NO: 2672266 - RNA, 19 nt, Homo sapiens
  misc_RNA (1)...(19): siRNA sense strand
caauaagcauauagacuac

SEQ ID NO: 2672267 - RNA, 19 nt, Homo sapiens
  misc_RNA (1)...(19): siRNA sense strand
agugagagccugagcagca

SEQ ID NO: 2672268 - RNA, 19 nt, Homo sapiens
  misc_RNA (1)...(19): siRNA sense strand
uggcauagaagaugggaag

SEQ ID NO: 2672269 - RNA, 19 nt, Homo sapiens
  misc_RNA (1)...(19): siRNA sense strand
caaaugagugagagccuga

SEQ ID NO: 2672270 - RNA, 19 nt, Homo sapiens
  misc_RNA (1)...(19): siRNA sense strand
gguuugggauugaaagacu

SEQ ID NO: 2672271 - RNA, 19 nt, Homo sapiens
  misc_RNA (1)...(19): siRNA sense strand
uggaaguguuggcggagga

SEQ ID NO: 2672272 - RNA, 19 nt, Homo sapiens
  misc_RNA (1)...(19): siRNA sense strand
uuaaaggcggaaagaagaa

SEQ ID NO: 2672273 - RNA, 19 nt, Homo sapiens
  misc_RNA (1)...(19): siRNA sense strand
gguggacuuugaagaggaa

SEQ ID NO: 2672274 - RNA, 19 nt, Homo sapiens
  misc_RNA (1)...(19): siRNA sense strand
gcuucaaaguucucccauu

SEQ ID NO: 2672275 - RNA, 19 nt, Homo sapiens
  misc_RNA (1)...(19): siRNA sense strand
cuaugaguacuuagaaaca

SEQ ID NO: 2672276 - RNA, 19 nt, Homo sapiens
  misc_RNA (1)...(19): siRNA sense strand
cuucuaaagcucauagcau

SEQ ID NO: 2672277 - RNA, 19 nt, Homo sapiens
  misc_RNA (1)...(19): siRNA sense strand
acaaaagggacucggaaga

SEQ ID NO: 2672278 - RNA, 19 nt, Homo sapiens
  misc_RNA (1)...(19): siRNA sense strand
cuuagaaacaguuacucaa

SEQ ID NO: 2672279 - RNA, 19 nt, Homo sapiens
  misc_RNA (1)...(19): siRNA sense strand
ccugaugacgagaauaaau

SEQ ID NO: 2672280 - RNA, 19 nt, Homo sapiens
  misc_RNA (1)...(19): siRNA sense strand
gucaauaagcauauagacu

SEQ ID NO: 2672281 - RNA, 19 nt, Homo sapiens
  misc_RNA (1)...(19): siRNA sense strand
gcacaauucagcagacauc

SEQ ID NO: 2672282 - RNA, 19 nt, Homo sapiens
  misc_RNA (1)...(19): siRNA sense strand
ggagagaaucaagagagaa

SEQ ID NO: 2672283 - RNA, 19 nt, Homo sapiens
  misc_RNA (1)...(19): siRNA sense strand
acauauggcuggacagaaa

SEQ ID NO: 2672284 - RNA, 19 nt, Homo sapiens
  misc_RNA (1)...(19): siRNA sense strand
cagaaaacauggagagaau

SEQ ID NO: 2672285 - RNA, 19 nt, Homo sapiens
  misc_RNA (1)...(19): siRNA sense strand
aagaaauagggaagagaaa

SEQ ID NO: 2672286 - RNA, 19 nt, Homo sapiens
  misc_RNA (1)...(19): siRNA sense strand
gaacaaagaauaaaggaga

SEQ ID NO: 2672287 - RNA, 19 nt, Homo sapiens
  misc_RNA (1)...(19): siRNA sense strand
aggaggagguugagacauu

SEQ ID NO: 2672288 - RNA, 19 nt, Homo sapiens
  misc_RNA (1)...(19): siRNA sense strand
uguggaacgucuugggaaa

SEQ ID NO: 2672289 - RNA, 19 nt, Homo sapiens
  misc_RNA (1)...(19): siRNA sense strand
caugaaagcucaagcccua

SEQ ID NO: 2672290 - RNA, 19 nt, Homo sapiens
  misc_RNA (1)...(19): siRNA sense strand
acguaugggucguggaaca

SEQ ID NO: 2672291 - RNA, 19 nt, Homo sapiens
  misc_RNA (1)...(19): siRNA sense strand
gagauuucaucauggauaa

SEQ ID NO: 2672292 - RNA, 19 nt, Homo sapiens
  misc_RNA (1)...(19): siRNA sense strand
aggcagaggcugauaagaa

SEQ ID NO: 2672293 - RNA, 19 nt, Homo sapiens
  misc_RNA (1)...(19): siRNA sense strand
gcaccagaaugaaggaaaa

SEQ ID NO: 2672294 - RNA, 19 nt, Homo sapiens
  misc_RNA (1)...(19): siRNA sense strand
ggagauaaauccugaugau

SEQ ID NO: 2672295 - RNA, 19 nt, Homo sapiens
  misc_RNA (1)...(19): siRNA sense strand
uuacagaacuggcggaaga

SEQ ID NO: 2672296 - RNA, 19 nt, Homo sapiens
  misc_RNA (1)...(19): siRNA sense strand
gcucaagcccuaagagaca

SEQ ID NO: 2672297 - RNA, 19 nt, Homo sapiens
  misc_RNA (1)...(19): siRNA sense strand
aaagagaacugcaagaaau

SEQ ID NO: 2672298 - RNA, 19 nt, Homo sapiens
  misc_RNA (1)...(19): siRNA sense strand
gcuuagaacucuuuacaga

SEQ ID NO: 2672299 - RNA, 19 nt, Homo sapiens
  misc_RNA (1)...(19): siRNA sense strand
cagaacuggcggaagauaa

SEQ ID NO: 2672300 - RNA, 19 nt, Homo sapiens
  misc_RNA (1)...(19): siRNA sense strand
caagaaacaccuggagaua

SEQ ID NO: 2672301 - RNA, 19 nt, Homo sapiens
  misc_RNA (1)...(19): siRNA sense strand
auugagaccuuaaggcaaa

SEQ ID NO: 2672302 - RNA, 19 nt, Homo sapiens
  misc_RNA (1)...(19): siRNA sense strand
ggguauugaugaagaugau

SEQ ID NO: 2672303 - RNA, 19 nt, Homo sapiens
  misc_RNA (1)...(19): siRNA sense strand
cauaaagcuuggaauacaa

SEQ ID NO: 2672304 - RNA, 19 nt, Homo sapiens
  misc_RNA (1)...(19): siRNA sense strand
gcauggaagaaguagacua

SEQ ID NO: 2672305 - RNA, 19 nt, Homo sapiens
  misc_RNA (1)...(19): siRNA sense strand
gauaaagagaacugcaaga

SEQ ID NO: 2672306 - RNA, 19 nt, Homo sapiens
  misc_RNA (1)...(19): siRNA sense strand
ugaaggaauuugaggggaa

SEQ ID NO: 2672307 - RNA, 19 nt, Homo sapiens
  misc_RNA (1)...(19): siRNA sense strand
ccaagaaacaccuggagau

SEQ ID NO: 2672308 - RNA, 19 nt, Homo sapiens
  misc_RNA (1)...(19): siRNA sense strand
uuauuugguugcugagaaa

SEQ ID NO: 2672309 - RNA, 19 nt, Homo sapiens
  misc_RNA (1)...(19): siRNA sense strand
gacaaaaucugguaugaaa

SEQ ID NO: 2672310 - RNA, 19 nt, Homo sapiens
  misc_RNA (1)...(19): siRNA sense strand
aggaagacaaagaagaaga

SEQ ID NO: 2672311 - RNA, 19 nt, Homo sapiens
  misc_RNA (1)...(19): siRNA sense strand
agaacuggcggaagauaaa

SEQ ID NO: 2672312 - RNA, 19 nt, Homo sapiens
  misc_RNA (1)...(19): siRNA sense strand
ccaaagaaggccuggaacu

SEQ ID NO: 2672313 - RNA, 19 nt, Homo sapiens
  misc_RNA (1)...(19): siRNA sense strand
aggagauugugaagaaaca

SEQ ID NO: 2672314 - RNA, 19 nt, Homo sapiens
  misc_RNA (1)...(19): siRNA sense strand
cgaaggagaugacgacaca

SEQ ID NO: 2672315 - RNA, 19 nt, Homo sapiens
  misc_RNA (1)...(19): siRNA sense strand
ggugacaagaagaagaaga

SEQ ID NO: 2672316 - RNA, 19 nt, Homo sapiens
  misc_RNA (1)...(19): siRNA sense strand
ggcaaaaggcagaggcuga

SEQ ID NO: 2672317 - RNA, 19 nt, Homo sapiens
  misc_RNA (1)...(19): siRNA sense strand
aagaaaaggaagacaaaga

SEQ ID NO: 2672318 - RNA, 19 nt, Homo sapiens
  misc_RNA (1)...(19): siRNA sense strand
cugaugaggaagaagaaaa

SEQ ID NO: 2672319 - RNA, 19 nt, Homo sapiens
  misc_RNA (1)...(19): siRNA sense strand
cuaaugaggaguacggaga

SEQ ID NO: 2672320 - RNA, 19 nt, Homo sapiens
  misc_RNA (1)...(19): siRNA sense strand
gggaagaucacuuggcagu

SEQ ID NO: 2672321 - RNA, 19 nt, Homo sapiens
  misc_RNA (1)...(19): siRNA sense strand
uaaagagaacugcaagaaa

SEQ ID NO: 2672322 - RNA, 19 nt, Homo sapiens
  misc_RNA (1)...(19): siRNA sense strand
ggcagaggcugauaagaau

SEQ ID NO: 2672323 - RNA, 19 nt, Homo sapiens
  misc_RNA (1)...(19): siRNA sense strand
gguaugaaagcuugacaga

SEQ ID NO: 2672324 - RNA, 19 nt, Homo sapiens
  misc_RNA (1)...(19): siRNA sense strand
uggaggaggaggagguuga

SEQ ID NO: 2672325 - RNA, 19 nt, Homo sapiens
  misc_RNA (1)...(19): siRNA sense strand
guaaauuagacucugggaa

SEQ ID NO: 2672326 - RNA, 19 nt, Homo sapiens
  misc_RNA (1)...(19): siRNA sense strand
cugaagaaaaggaagacaa

SEQ ID NO: 2672327 - RNA, 19 nt, Homo sapiens
  misc_RNA (1)...(19): siRNA sense strand
uaugaaagcuugacagauc

SEQ ID NO: 2672328 - RNA, 19 nt, Homo sapiens
  misc_RNA (1)...(19): siRNA sense strand
acgaugagacugaagaaaa

SEQ ID NO: 2672329 - RNA, 19 nt, Homo sapiens
  misc_RNA (1)...(19): siRNA sense strand
aaagaaauagggaagagaa

SEQ ID NO: 2672330 - RNA, 19 nt, Homo sapiens
  misc_RNA (1)...(19): siRNA sense strand
ugaagaaaaggaagacaaa

SEQ ID NO: 2672331 - RNA, 19 nt, Homo sapiens
  misc_RNA (1)...(19): siRNA sense strand
guugaaggacaguuggaau

SEQ ID NO: 2672332 - RNA, 19 nt, Homo sapiens
  misc_RNA (1)...(19): siRNA sense strand
aagagaacugcaagaaauu

SEQ ID NO: 2672333 - RNA, 19 nt, Homo sapiens
  misc_RNA (1)...(19): siRNA sense strand
ggaccuacaggaugaucaa

SEQ ID NO: 2672334 - RNA, 19 nt, Homo sapiens
  misc_RNA (1)...(19): siRNA sense strand
agagauuucaucauggaua

SEQ ID NO: 2672335 - RNA, 19 nt, Homo sapiens
  misc_RNA (1)...(19): siRNA sense strand
ccuuauaccaaacaaacaa

SEQ ID NO: 2672336 - RNA, 19 nt, Homo sapiens
  misc_RNA (1)...(19): siRNA sense strand
gaucaauaaccuugguacu

SEQ ID NO: 2672337 - RNA, 19 nt, Homo sapiens
  misc_RNA (1)...(19): siRNA sense strand
gaggacagacacaggugaa

SEQ ID NO: 2672338 - RNA, 19 nt, Homo sapiens
  misc_RNA (1)...(19): siRNA sense strand
auucaucaccugagagaaa

SEQ ID NO: 2672339 - RNA, 19 nt, Homo sapiens
  misc_RNA (1)...(19): siRNA sense strand
ugguguacgucgugggcaa

SEQ ID NO: 2672340 - RNA, 19 nt, Homo sapiens
  misc_RNA (1)...(19): siRNA sense strand
agaaacaaccagagacuau

SEQ ID NO: 2672341 - RNA, 19 nt, Homo sapiens
  misc_RNA (1)...(19): siRNA sense strand
aagccaagaggaagggaua

SEQ ID NO: 2672342 - RNA, 19 nt, Homo sapiens
  misc_RNA (1)...(19): siRNA sense strand
ccgaaagaaagaagaugua

SEQ ID NO: 2672343 - RNA, 19 nt, Homo sapiens
  misc_RNA (1)...(19): siRNA sense strand
cccaauaaccuguggauca

SEQ ID NO: 2672344 - RNA, 19 nt, Homo sapiens
  misc_RNA (1)...(19): siRNA sense strand
cugcagaccugaagcaaca

SEQ ID NO: 2672345 - RNA, 19 nt, Homo sapiens
  misc_RNA (1)...(19): siRNA sense strand
caaagauacugcugggcau

SEQ ID NO: 2672346 - RNA, 19 nt, Homo sapiens
  misc_RNA (1)...(19): siRNA sense strand
uccagaacaucuugggaua

SEQ ID NO: 2672347 - RNA, 19 nt, Homo sapiens
  misc_RNA (1)...(19): siRNA sense strand
accagagacuauuggguaa

SEQ ID NO: 2672348 - RNA, 19 nt, Homo sapiens
  misc_RNA (1)...(19): siRNA sense strand
gccugaaaucauagaggaa

SEQ ID NO: 2672349 - RNA, 19 nt, Homo sapiens
  misc_RNA (1)...(19): siRNA sense strand
ugacaaaggaggaggcaag

SEQ ID NO: 2672350 - RNA, 19 nt, Homo sapiens
  misc_RNA (1)...(19): siRNA sense strand
uugcugaaccacuggaaua

SEQ ID NO: 2672351 - RNA, 19 nt, Homo sapiens
  misc_RNA (1)...(19): siRNA sense strand
cugaaaucauagaggaaac

SEQ ID NO: 2672352 - RNA, 19 nt, Homo sapiens
  misc_RNA (1)...(19): siRNA sense strand
caggguacaucgaggccua

SEQ ID NO: 2672353 - RNA, 19 nt, Homo sapiens
  misc_RNA (1)...(19): siRNA sense strand
cgaaaugcuggguguguau

SEQ ID NO: 2672354 - RNA, 19 nt, Homo sapiens
  misc_RNA (1)...(19): siRNA sense strand
cacacugggucaagagcaa

SEQ ID NO: 2672355 - RNA, 19 nt, Homo sapiens
  misc_RNA (1)...(19): siRNA sense strand
gugaaaggccacucggaga

SEQ ID NO: 2672356 - RNA, 19 nt, Homo sapiens
  misc_RNA (1)...(19): siRNA sense strand
uguuugaguuccaggucua

SEQ ID NO: 2672357 - RNA, 19 nt, Homo sapiens
  misc_RNA (1)...(19): siRNA sense strand
ucacacaggcauugcggaa

SEQ ID NO: 2672358 - RNA, 19 nt, Homo sapiens
  misc_RNA (1)...(19): siRNA sense strand
ggacauaccacgagcacac

SEQ ID NO: 2672359 - RNA, 19 nt, Homo sapiens
  misc_RNA (1)...(19): siRNA sense strand
cugcagaaggguuuaguau

SEQ ID NO: 2672360 - RNA, 19 nt, Homo sapiens
  misc_RNA (1)...(19): siRNA sense strand
agggaagaaugaagaggca

SEQ ID NO: 2672361 - RNA, 19 nt, Homo sapiens
  misc_RNA (1)...(19): siRNA sense strand
caggcuacuuccagcuaaa

SEQ ID NO: 2672362 - RNA, 19 nt, Homo sapiens
  misc_RNA (1)...(19): siRNA sense strand
ccucagcagcagacagaau

SEQ ID NO: 2672363 - RNA, 19 nt, Homo sapiens
  misc_RNA (1)...(19): siRNA sense strand
ugauuuaaauggacacaca

SEQ ID NO: 2672364 - RNA, 19 nt, Homo sapiens
  misc_RNA (1)...(19): siRNA sense strand
cugcaguggagacgagcaa

SEQ ID NO: 2672365 - RNA, 19 nt, Homo sapiens
  misc_RNA (1)...(19): siRNA sense strand
auagaaaugaccagcagaa

SEQ ID NO: 2672366 - RNA, 19 nt, Homo sapiens
  misc_RNA (1)...(19): siRNA sense strand
ccuccagcccacagagaau

SEQ ID NO: 2672367 - RNA, 19 nt, Homo sapiens
  misc_RNA (1)...(19): siRNA sense strand
ucugaaauuuccagugaca

SEQ ID NO: 2672368 - RNA, 19 nt, Homo sapiens
  misc_RNA (1)...(19): siRNA sense strand
auguaauggcacagcagaa

SEQ ID NO: 2672369 - RNA, 19 nt, Homo sapiens
  misc_RNA (1)...(19): siRNA sense strand
agaaagugacaaaggagga

SEQ ID NO: 2672370 - RNA, 19 nt, Homo sapiens
  misc_RNA (1)...(19): siRNA sense strand
gucagcagcuccagagaau

SEQ ID NO: 2672371 - RNA, 19 nt, Homo sapiens
  misc_RNA (1)...(19): siRNA sense strand
ggacagugugacagccauu

SEQ ID NO: 2672372 - RNA, 19 nt, Homo sapiens
  misc_RNA (1)...(19): siRNA sense strand
cagguagcuugcaggaaau

SEQ ID NO: 2672373 - RNA, 19 nt, Homo sapiens
  misc_RNA (1)...(19): siRNA sense strand
ggaucuaguccucgguaca

SEQ ID NO: 2672374 - RNA, 19 nt, Homo sapiens
  misc_RNA (1)...(19): siRNA sense strand
auacagccaugcaaggaaa

SEQ ID NO: 2672375 - RNA, 19 nt, Homo sapiens
  misc_RNA (1)...(19): siRNA sense strand
aggaagaacaagaacgacu

SEQ ID NO: 2672376 - RNA, 19 nt, Homo sapiens
  misc_RNA (1)...(19): siRNA sense strand
uaacaauaggagacaugaa

SEQ ID NO: 2672377 - RNA, 19 nt, Homo sapiens
  misc_RNA (1)...(19): siRNA sense strand
ggacaggagccaggaguca

SEQ ID NO: 2672378 - RNA, 19 nt, Homo sapiens
  misc_RNA (1)...(19): siRNA sense strand
ccucagacaucggcagcaa

SEQ ID NO: 2672379 - RNA, 19 nt, Homo sapiens
  misc_RNA (1)...(19): siRNA sense strand
cugcaaaugacucugcuaa

SEQ ID NO: 2672380 - RNA, 19 nt, Homo sapiens
  misc_RNA (1)...(19): siRNA sense strand
aggcauugcggaaggcuuu

SEQ ID NO: 2672381 - RNA, 19 nt, Homo sapiens
  misc_RNA (1)...(19): siRNA sense strand
aagagcaguucgaugacua

SEQ ID NO: 2672382 - RNA, 19 nt, Homo sapiens
  misc_RNA (1)...(19): siRNA sense strand
caacuugacaauucagauu

SEQ ID NO: 2672383 - RNA, 19 nt, Homo sapiens
  misc_RNA (1)...(19): siRNA sense strand
uuacagugcugcagggugu

SEQ ID NO: 2672384 - RNA, 19 nt, Homo sapiens
  misc_RNA (1)...(19): siRNA sense strand
agaacaagaacgacuucaa

SEQ ID NO: 2672385 - RNA, 19 nt, Homo sapiens
  misc_RNA (1)...(19): siRNA sense strand
gagcaaagccugugcaagg

SEQ ID NO: 2672386 - RNA, 19 nt, Homo sapiens
  misc_RNA (1)...(19): siRNA sense strand
gaggcaaggaagagaaaug

SEQ ID NO: 2672387 - RNA, 19 nt, Homo sapiens
  misc_RNA (1)...(19): siRNA sense strand
gagaaaugugccagcgagu

SEQ ID NO: 2672388 - RNA, 19 nt, Homo sapiens
  misc_RNA (1)...(19): siRNA sense strand
ugaacaaagcccugaagca

SEQ ID NO: 2672389 - RNA, 19 nt, Homo sapiens
  misc_RNA (1)...(19): siRNA sense strand
cgaagaggagggagcgguu

SEQ ID NO: 2672390 - RNA, 19 nt, Homo sapiens
  misc_RNA (1)...(19): siRNA sense strand
aggaggcaaggaagagaaa

SEQ ID NO: 2672391 - RNA, 19 nt, Homo sapiens
  misc_RNA (1)...(19): siRNA sense strand
gggaagaaugaagaggcaa

SEQ ID NO: 2672392 - RNA, 19 nt, Homo sapiens
  misc_RNA (1)...(19): siRNA sense strand
ccugaaaucauagaggaaa

SEQ ID NO: 2672393 - RNA, 19 nt, Homo sapiens
  misc_RNA (1)...(19): siRNA sense strand
ugugcaaggcuuugauuau

SEQ ID NO: 2672394 - RNA, 19 nt, Homo sapiens
  misc_RNA (1)...(19): siRNA sense strand
ggacacacaauuagcacca

SEQ ID NO: 2672395 - RNA, 19 nt, Homo sapiens
  misc_RNA (1)...(19): siRNA sense strand
ccaaaagcaacuugacaau

SEQ ID NO: 2672396 - RNA, 19 nt, Homo sapiens
  misc_RNA (1)...(19): siRNA sense strand
gaggaggcaaggaagagaa

SEQ ID NO: 2672397 - RNA, 19 nt, Homo sapiens
  misc_RNA (1)...(19): siRNA sense strand
cugcuaacccgcugcauuu

SEQ ID NO: 2672398 - RNA, 19 nt, Homo sapiens
  misc_RNA (1)...(19): siRNA sense strand
ccacaccauuccagaacau

SEQ ID NO: 2672399 - RNA, 19 nt, Homo sapiens
  misc_RNA (1)...(19): siRNA sense strand
agucacuaguggagaucaa

SEQ ID NO: 2672400 - RNA, 19 nt, Homo sapiens
  misc_RNA (1)...(19): siRNA sense strand
ccacagagcacaaggucga

SEQ ID NO: 2672401 - RNA, 19 nt, Homo sapiens
  misc_RNA (1)...(19): siRNA sense strand
ugauauaaacagugggauc

SEQ ID NO: 2672402 - RNA, 19 nt, Homo sapiens
  misc_RNA (1)...(19): siRNA sense strand
agacaauguacaagagacu

SEQ ID NO: 2672403 - RNA, 19 nt, Homo sapiens
  misc_RNA (1)...(19): siRNA sense strand
agcacaaggucgacagaga

SEQ ID NO: 2672404 - RNA, 19 nt, Homo sapiens
  misc_RNA (1)...(19): siRNA sense strand
ccgacuagacuuaggggaa

SEQ ID NO: 2672405 - RNA, 19 nt, Homo sapiens
  misc_RNA (1)...(19): siRNA sense strand
cuguccaacuugagguauu

SEQ ID NO: 2672406 - RNA, 19 nt, Homo sapiens
  misc_RNA (1)...(19): siRNA sense strand
cacaaggucgacagagaaa

SEQ ID NO: 2672407 - RNA, 19 nt, Homo sapiens
  misc_RNA (1)...(19): siRNA sense strand
ccgucacaguagagacuau

SEQ ID NO: 2672408 - RNA, 19 nt, Homo sapiens
  misc_RNA (1)...(19): siRNA sense strand
gcuggaucuuucugggaau

SEQ ID NO: 2672409 - RNA, 19 nt, Homo sapiens
  misc_RNA (1)...(19): siRNA sense strand
ucaucaaagugaacagcuu

SEQ ID NO: 2672410 - RNA, 19 nt, Homo sapiens
  misc_RNA (1)...(19): siRNA sense strand
acuugagacacuuggaaau

SEQ ID NO: 2672411 - RNA, 19 nt, Homo sapiens
  misc_RNA (1)...(19): siRNA sense strand
caguugaguaggaaccaua

SEQ ID NO: 2672412 - RNA, 19 nt, Homo sapiens
  misc_RNA (1)...(19): siRNA sense strand
cucuaaagacaauguacaa

SEQ ID NO: 2672413 - RNA, 19 nt, Homo sapiens
  misc_RNA (1)...(19): siRNA sense strand
augaugagauuacgggaga

SEQ ID NO: 2672414 - RNA, 19 nt, Homo sapiens
  misc_RNA (1)...(19): siRNA sense strand
caucacaacccuuggaacu

SEQ ID NO: 2672415 - RNA, 19 nt, Homo sapiens
  misc_RNA (1)...(19): siRNA sense strand
agaucaaccuggcacacaa

SEQ ID NO: 2672416 - RNA, 19 nt, Homo sapiens
  misc_RNA (1)...(19): siRNA sense strand
ggucaugaagacuaccaaa

SEQ ID NO: 2672417 - RNA, 19 nt, Homo sapiens
  misc_RNA (1)...(19): siRNA sense strand
acauguauggugaguaauu

SEQ ID NO: 2672418 - RNA, 19 nt, Homo sapiens
  misc_RNA (1)...(19): siRNA sense strand
ugagauuacgggagacaca

SEQ ID NO: 2672419 - RNA, 19 nt, Homo sapiens
  misc_RNA (1)...(19): siRNA sense strand
gggcguacaaagugcggau

SEQ ID NO: 2672420 - RNA, 19 nt, Homo sapiens
  misc_RNA (1)...(19): siRNA sense strand
cugcagugaugcuggucau

SEQ ID NO: 2672421 - RNA, 19 nt, Homo sapiens
  misc_RNA (1)...(19): siRNA sense strand
ugucuaaacugaaggagcu

SEQ ID NO: 2672422 - RNA, 19 nt, Homo sapiens
  misc_RNA (1)...(19): siRNA sense strand
aguaggaaccauaucagaa

SEQ ID NO: 2672423 - RNA, 19 nt, Homo sapiens
  misc_RNA (1)...(19): siRNA sense strand
ugauacagucccagauuca

SEQ ID NO: 2672424 - RNA, 19 nt, Homo sapiens
  misc_RNA (1)...(19): siRNA sense strand
acaauguacaagagacuca

SEQ ID NO: 2672425 - RNA, 19 nt, Homo sapiens
  misc_RNA (1)...(19): siRNA sense strand
aagcagcaccaucggcaaa

SEQ ID NO: 2672426 - RNA, 19 nt, Homo sapiens
  misc_RNA (1)...(19): siRNA sense strand
agaaccaaauccagaucau

SEQ ID NO: 2672427 - RNA, 19 nt, Homo sapiens
  misc_RNA (1)...(19): siRNA sense strand
augugcaaccuucgggaaa

SEQ ID NO: 2672428 - RNA, 19 nt, Homo sapiens
  misc_RNA (1)...(19): siRNA sense strand
agugaugguacguuaaauu

SEQ ID NO: 2672429 - RNA, 19 nt, Homo sapiens
  misc_RNA (1)...(19): siRNA sense strand
gaaccauaucagaaccauu

SEQ ID NO: 2672430 - RNA, 19 nt, Homo sapiens
  misc_RNA (1)...(19): siRNA sense strand
ugggaauacuacugcuuca

SEQ ID NO: 2672431 - RNA, 19 nt, Homo sapiens
  misc_RNA (1)...(19): siRNA sense strand
gcgccaaccugcagggaaa

SEQ ID NO: 2672432 - RNA, 19 nt, Homo sapiens
  misc_RNA (1)...(19): siRNA sense strand
gaggagaacugcaauguua

SEQ ID NO: 2672433 - RNA, 19 nt, Homo sapiens
  misc_RNA (1)...(19): siRNA sense strand
gcaaaguacugaucaacaa

SEQ ID NO: 2672434 - RNA, 19 nt, Homo sapiens
  misc_RNA (1)...(19): siRNA sense strand
gcuacuggcaugagugaaa

SEQ ID NO: 2672435 - RNA, 19 nt, Homo sapiens
  misc_RNA (1)...(19): siRNA sense strand
ggaaaucauucgcaacaaa

SEQ ID NO: 2672436 - RNA, 19 nt, Homo sapiens
  misc_RNA (1)...(19): siRNA sense strand
ucaagaucguagagggaau

SEQ ID NO: 2672437 - RNA, 19 nt, Homo sapiens
  misc_RNA (1)...(19): siRNA sense strand
gaagagaacugugagaaua

SEQ ID NO: 2672438 - RNA, 19 nt, Homo sapiens
  misc_RNA (1)...(19): siRNA sense strand
uggaaggacucauggauau

SEQ ID NO: 2672439 - RNA, 19 nt, Homo sapiens
  misc_RNA (1)...(19): siRNA sense strand
ugaaacaggcuaugaacua

SEQ ID NO: 2672440 - RNA, 19 nt, Homo sapiens
  misc_RNA (1)...(19): siRNA sense strand
ggacaacgacugugaggau

SEQ ID NO: 2672441 - RNA, 19 nt, Homo sapiens
  misc_RNA (1)...(19): siRNA sense strand
gaaggaagaugcucugaaa

SEQ ID NO: 2672442 - RNA, 19 nt, Homo sapiens
  misc_RNA (1)...(19): siRNA sense strand
ugaagagaacugugagaau

SEQ ID NO: 2672443 - RNA, 19 nt, Homo sapiens
  misc_RNA (1)...(19): siRNA sense strand
ggacagacuggcagaccaa

SEQ ID NO: 2672444 - RNA, 19 nt, Homo sapiens
  misc_RNA (1)...(19): siRNA sense strand
ggaaaguguugguguggca

SEQ ID NO: 2672445 - RNA, 19 nt, Homo sapiens
  misc_RNA (1)...(19): siRNA sense strand
gcauccagcugaagggaga

SEQ ID NO: 2672446 - RNA, 19 nt, Homo sapiens
  misc_RNA (1)...(19): siRNA sense strand
caucaauagcgcuaacaaa

SEQ ID NO: 2672447 - RNA, 19 nt, Homo sapiens
  misc_RNA (1)...(19): siRNA sense strand
gggcaaacuuggaugguuc

SEQ ID NO: 2672448 - RNA, 19 nt, Homo sapiens
  misc_RNA (1)...(19): siRNA sense strand
acaccaaggagaagaucaa

SEQ ID NO: 2672449 - RNA, 19 nt, Homo sapiens
  misc_RNA (1)...(19): siRNA sense strand
uuccaaugcuggugugaaa

SEQ ID NO: 2672450 - RNA, 19 nt, Homo sapiens
  misc_RNA (1)...(19): siRNA sense strand
ggauuggguccaugacaaa

SEQ ID NO: 2672451 - RNA, 19 nt, Homo sapiens
  misc_RNA (1)...(19): siRNA sense strand
uggcaaauguggaaggacu

SEQ ID NO: 2672452 - RNA, 19 nt, Homo sapiens
  misc_RNA (1)...(19): siRNA sense strand
ccacacaggaagugaagau

SEQ ID NO: 2672453 - RNA, 19 nt, Homo sapiens
  misc_RNA (1)...(19): siRNA sense strand
ccucagagagccaggucua

SEQ ID NO: 2672454 - RNA, 19 nt, Homo sapiens
  misc_RNA (1)...(19): siRNA sense strand
guggaaggacucauggaua

SEQ ID NO: 2672455 - RNA, 19 nt, Homo sapiens
  misc_RNA (1)...(19): siRNA sense strand
caucaucaccacagggcua

SEQ ID NO: 2672456 - RNA, 19 nt, Homo sapiens
  misc_RNA (1)...(19): siRNA sense strand
gggagacucugcaggagaa

SEQ ID NO: 2672457 - RNA, 19 nt, Homo sapiens
  misc_RNA (1)...(19): siRNA sense strand
ggaagaaccaggaaaucau

SEQ ID NO: 2672458 - RNA, 19 nt, Homo sapiens
  misc_RNA (1)...(19): siRNA sense strand
gcuggaaacaugaacgcaa

SEQ ID NO: 2672459 - RNA, 19 nt, Homo sapiens
  misc_RNA (1)...(19): siRNA sense strand
augacagcguggauggaaa

SEQ ID NO: 2672460 - RNA, 19 nt, Homo sapiens
  misc_RNA (1)...(19): siRNA sense strand
aggagacagugcuggcaaa

SEQ ID NO: 2672461 - RNA, 19 nt, Homo sapiens
  misc_RNA (1)...(19): siRNA sense strand
gggcacagccacuagguuu

SEQ ID NO: 2672462 - RNA, 19 nt, Homo sapiens
  misc_RNA (1)...(19): siRNA sense strand
ggaaaguguugcuguggca

SEQ ID NO: 2672463 - RNA, 19 nt, Homo sapiens
  misc_RNA (1)...(19): siRNA sense strand
uggguuagcuauugauuau

SEQ ID NO: 2672464 - RNA, 19 nt, Homo sapiens
  misc_RNA (1)...(19): siRNA sense strand
ggacagacacgggaacaaa

SEQ ID NO: 2672465 - RNA, 19 nt, Homo sapiens
  misc_RNA (1)...(19): siRNA sense strand
ccaccagcuccuagggcua

SEQ ID NO: 2672466 - RNA, 19 nt, Homo sapiens
  misc_RNA (1)...(19): siRNA sense strand
gggagaaugccaaguuaga

SEQ ID NO: 2672467 - RNA, 19 nt, Homo sapiens
  misc_RNA (1)...(19): siRNA sense strand
cagcaagacagguggaucu

SEQ ID NO: 2672468 - RNA, 19 nt, Homo sapiens
  misc_RNA (1)...(19): siRNA sense strand
aauccagcguguugacaaa

SEQ ID NO: 2672469 - RNA, 19 nt, Homo sapiens
  misc_RNA (1)...(19): siRNA sense strand
ccugcaaccuggaggaguu

SEQ ID NO: 2672470 - RNA, 19 nt, Homo sapiens
  misc_RNA (1)...(19): siRNA sense strand
gcacugcgauggugacaau

SEQ ID NO: 2672471 - RNA, 19 nt, Homo sapiens
  misc_RNA (1)...(19): siRNA sense strand
ggacagacacaggucgaaa

SEQ ID NO: 2672472 - RNA, 19 nt, Homo sapiens
  misc_RNA (1)...(19): siRNA sense strand
gugcugaccucaaugggaa

SEQ ID NO: 2672473 - RNA, 19 nt, Homo sapiens
  misc_RNA (1)...(19): siRNA sense strand
gggaugaccucaagcaacu

SEQ ID NO: 2672474 - RNA, 19 nt, Homo sapiens
  misc_RNA (1)...(19): siRNA sense strand
acgaaagcccacagcagaa

SEQ ID NO: 2672475 - RNA, 19 nt, Homo sapiens
  misc_RNA (1)...(19): siRNA sense strand
gggaagaaccaggaaauca

SEQ ID NO: 2672476 - RNA, 19 nt, Homo sapiens
  misc_RNA (1)...(19): siRNA sense strand
uggaaaaccuaauggacau

SEQ ID NO: 2672477 - RNA, 19 nt, Homo sapiens
  misc_RNA (1)...(19): siRNA sense strand
gcgcggugcucaucaacaa

SEQ ID NO: 2672478 - RNA, 19 nt, Homo sapiens
  misc_RNA (1)...(19): siRNA sense strand
uguacuggguggaugcuaa

SEQ ID NO: 2672479 - RNA, 19 nt, Homo sapiens
  misc_RNA (1)...(19): siRNA sense strand
caccauugccauuggagua

SEQ ID NO: 2672480 - RNA, 19 nt, Homo sapiens
  misc_RNA (1)...(19): siRNA sense strand
ggacugacuggcagaccaa

SEQ ID NO: 2672481 - RNA, 19 nt, Homo sapiens
  misc_RNA (1)...(19): siRNA sense strand
ggacaaggccagcucccaa

SEQ ID NO: 2672482 - RNA, 19 nt, Homo sapiens
  misc_RNA (1)...(19): siRNA sense strand
gcagcaacauggagacagu

SEQ ID NO: 2672483 - RNA, 19 nt, Homo sapiens
  misc_RNA (1)...(19): siRNA sense strand
agggagggccugaccauaa

SEQ ID NO: 2672484 - RNA, 19 nt, Homo sapiens
  misc_RNA (1)...(19): siRNA sense strand
gaugaagagaacugugaga

SEQ ID NO: 2672485 - RNA, 19 nt, Homo sapiens
  misc_RNA (1)...(19): siRNA sense strand
ggacagacuggcacaccaa

SEQ ID NO: 2672486 - RNA, 19 nt, Homo sapiens
  misc_RNA (1)...(19): siRNA sense strand
ugaaaagagcccagugcua

SEQ ID NO: 2672487 - RNA, 19 nt, Homo sapiens
  misc_RNA (1)...(19): siRNA sense strand
caacagcgaugaagagaac

SEQ ID NO: 2672488 - RNA, 19 nt, Homo sapiens
  misc_RNA (1)...(19): siRNA sense strand
gaccuggccuaauggguua

SEQ ID NO: 2672489 - RNA, 19 nt, Homo sapiens
  misc_RNA (1)...(19): siRNA sense strand
aaaguauacuggacagaca

SEQ ID NO: 2672490 - RNA, 19 nt, Homo sapiens
  misc_RNA (1)...(19): siRNA sense strand
gccgcaaaguacugaucaa

SEQ ID NO: 2672491 - RNA, 19 nt, Homo sapiens
  misc_RNA (1)...(19): siRNA sense strand
ggaggagguggaaggaaga

SEQ ID NO: 2672492 - RNA, 19 nt, Homo sapiens
  misc_RNA (1)...(19): siRNA sense strand
cacaggaagugaagauuga

SEQ ID NO: 2672493 - RNA, 19 nt, Homo sapiens
  misc_RNA (1)...(19): siRNA sense strand
auaacuacaccaaggagaa

SEQ ID NO: 2672494 - RNA, 19 nt, Homo sapiens
  misc_RNA (1)...(19): siRNA sense strand
gggaugaugcugaguggga

SEQ ID NO: 2672495 - RNA, 19 nt, Homo sapiens
  misc_RNA (1)...(19): siRNA sense strand
gcagcaacguggaggaggu

SEQ ID NO: 2672496 - RNA, 19 nt, Homo sapiens
  misc_RNA (1)...(19): siRNA sense strand
cuaacaaauuuacggggaa

SEQ ID NO: 2672497 - RNA, 19 nt, Homo sapiens
  misc_RNA (1)...(19): siRNA sense strand
gcaucaaccugcugucuga

SEQ ID NO: 2672498 - RNA, 19 nt, Homo sapiens
  misc_RNA (1)...(19): siRNA sense strand
caggaucagucgugccaau

SEQ ID NO: 2672499 - RNA, 19 nt, Homo sapiens
  misc_RNA (1)...(19): siRNA sense strand
acaagugcggcucgagaaa

SEQ ID NO: 2672500 - RNA, 19 nt, Homo sapiens
  misc_RNA (1)...(19): siRNA sense strand
ggaacaaaccggauugaag

SEQ ID NO: 2672501 - RNA, 19 nt, Homo sapiens
  misc_RNA (1)...(19): siRNA sense strand
cuuugaugcuguacagaca

SEQ ID NO: 2672502 - RNA, 19 nt, Homo sapiens
  misc_RNA (1)...(19): siRNA sense strand
gggagugugaggaggacga

SEQ ID NO: 2672503 - RNA, 19 nt, Homo sapiens
  misc_RNA (1)...(19): siRNA sense strand
cagaugggcucgcgguuga

SEQ ID NO: 2672504 - RNA, 19 nt, Homo sapiens
  misc_RNA (1)...(19): siRNA sense strand
gaacaaaccggauugaagu

SEQ ID NO: 2672505 - RNA, 19 nt, Homo sapiens
  misc_RNA (1)...(19): siRNA sense strand
ccgaacauccacacaggaa

SEQ ID NO: 2672506 - RNA, 19 nt, Homo sapiens
  misc_RNA (1)...(19): siRNA sense strand
uggaggagguggaaggaag

SEQ ID NO: 2672507 - RNA, 19 nt, Homo sapiens
  misc_RNA (1)...(19): siRNA sense strand
acacacugcugcuuaacaa

SEQ ID NO: 2672508 - RNA, 19 nt, Homo sapiens
  misc_RNA (1)...(19): siRNA sense strand
guggauaccaguuuggaga

SEQ ID NO: 2672509 - RNA, 19 nt, Homo sapiens
  misc_RNA (1)...(19): siRNA sense strand
gaagaacaccauugccauu

SEQ ID NO: 2672510 - RNA, 19 nt, Homo sapiens
  misc_RNA (1)...(19): siRNA sense strand
gcaaagauggcuccgauga

SEQ ID NO: 2672511 - RNA, 19 nt, Homo sapiens
  misc_RNA (1)...(19): siRNA sense strand
cuggacagaugcagguaca

SEQ ID NO: 2672512 - RNA, 19 nt, Homo sapiens
  misc_RNA (1)...(19): siRNA sense strand
acaacagcgaugaagagaa

SEQ ID NO: 2672513 - RNA, 19 nt, Homo sapiens
  misc_RNA (1)...(19): siRNA sense strand
aguacacacugcugcuuaa

SEQ ID NO: 2672514 - RNA, 19 nt, Homo sapiens
  misc_RNA (1)...(19): siRNA sense strand
cggggaagaaccaggaaau

SEQ ID NO: 2672515 - RNA, 19 nt, Homo sapiens
  misc_RNA (1)...(19): siRNA sense strand
caggaaaucauucgcaaca

SEQ ID NO: 2672516 - RNA, 19 nt, Homo sapiens
  misc_RNA (1)...(19): siRNA sense strand
ugaccugaauggugccaau

SEQ ID NO: 2672517 - RNA, 19 nt, Homo sapiens
  misc_RNA (1)...(19): siRNA sense strand
gcguggauggaaaggucua

SEQ ID NO: 2672518 - RNA, 19 nt, Homo sapiens
  misc_RNA (1)...(19): siRNA sense strand
acaacgacugugaggauga

SEQ ID NO: 2672519 - RNA, 19 nt, Homo sapiens
  misc_RNA (1)...(19): siRNA sense strand
gcgaugaagagaacuguga

SEQ ID NO: 2672520 - RNA, 19 nt, Homo sapiens
  misc_RNA (1)...(19): siRNA sense strand
gaacaggacaggagguggu

SEQ ID NO: 2672521 - RNA, 19 nt, Homo sapiens
  misc_RNA (1)...(19): siRNA sense strand
gccaagaucgaacgggcaa

SEQ ID NO: 2672522 - RNA, 19 nt, Homo sapiens
  misc_RNA (1)...(19): siRNA sense strand
cagacaacagcgaugaaga

SEQ ID NO: 2672523 - RNA, 19 nt, Homo sapiens
  misc_RNA (1)...(19): siRNA sense strand
cgaggauugagguggccaa

SEQ ID NO: 2672524 - RNA, 19 nt, Homo sapiens
  misc_RNA (1)...(19): siRNA sense strand
gaacaguacucaucuggga

SEQ ID NO: 2672525 - RNA, 19 nt, Homo sapiens
  misc_RNA (1)...(19): siRNA sense strand
aguuagagcgguccggaau

SEQ ID NO: 2672526 - RNA, 19 nt, Homo sapiens
  misc_RNA (1)...(19): siRNA sense strand
agacagugcuggcaaaugu

SEQ ID NO: 2672527 - RNA, 19 nt, Homo sapiens
  misc_RNA (1)...(19): siRNA sense strand
gcuauaagaaagagggagg

SEQ ID NO: 2672528 - RNA, 19 nt, Homo sapiens
  misc_RNA (1)...(19): siRNA sense strand
aggagaacugcaauguuaa

SEQ ID NO: 2672529 - RNA, 19 nt, Homo sapiens
  misc_RNA (1)...(19): siRNA sense strand
gcuuaacaaccuggagaau

SEQ ID NO: 2672530 - RNA, 19 nt, Homo sapiens
  misc_RNA (1)...(19): siRNA sense strand
caauagcgcuaacaaauuu

SEQ ID NO: 2672531 - RNA, 19 nt, Homo sapiens
  misc_RNA (1)...(19): siRNA sense strand
gguacaaaguccagaauaa

SEQ ID NO: 2672532 - RNA, 19 nt, Homo sapiens
  misc_RNA (1)...(19): siRNA sense strand
gaaccaaacaguagugaaa

SEQ ID NO: 2672533 - RNA, 19 nt, Homo sapiens
  misc_RNA (1)...(19): siRNA sense strand
ggaaauggauuaugaaaca

SEQ ID NO: 2672534 - RNA, 19 nt, Homo sapiens
  misc_RNA (1)...(19): siRNA sense strand
uggaagaucuggagaaaga

SEQ ID NO: 2672535 - RNA, 19 nt, Homo sapiens
  misc_RNA (1)...(19): siRNA sense strand
ggagugaacugaagaaaga

SEQ ID NO: 2672536 - RNA, 19 nt, Homo sapiens
  misc_RNA (1)...(19): siRNA sense strand
auaaugagguugugggaau

SEQ ID NO: 2672537 - RNA, 19 nt, Homo sapiens
  misc_RNA (1)...(19): siRNA sense strand
uagaagaagcuguggauuu

SEQ ID NO: 2672538 - RNA, 19 nt, Homo sapiens
  misc_RNA (1)...(19): siRNA sense strand
ugaaguaggcaaagaggaa

SEQ ID NO: 2672539 - RNA, 19 nt, Homo sapiens
  misc_RNA (1)...(19): siRNA sense strand
uagaauguuugaugggaaa

SEQ ID NO: 2672540 - RNA, 19 nt, Homo sapiens
  misc_RNA (1)...(19): siRNA sense strand
uggaagaccucuggagaua

SEQ ID NO: 2672541 - RNA, 19 nt, Homo sapiens
  misc_RNA (1)...(19): siRNA sense strand
ccaagaaguugcaagaaaa

SEQ ID NO: 2672542 - RNA, 19 nt, Homo sapiens
  misc_RNA (1)...(19): siRNA sense strand
uugacaaauuggaggacua

SEQ ID NO: 2672543 - RNA, 19 nt, Homo sapiens
  misc_RNA (1)...(19): siRNA sense strand
accaaacaguagugaaaua

SEQ ID NO: 2672544 - RNA, 19 nt, Homo sapiens
  misc_RNA (1)...(19): siRNA sense strand
gagccaaacuggauugaau

SEQ ID NO: 2672545 - RNA, 19 nt, Homo sapiens
  misc_RNA (1)...(19): siRNA sense strand
ggaggauauuuguaguaaa

SEQ ID NO: 2672546 - RNA, 19 nt, Homo sapiens
  misc_RNA (1)...(19): siRNA sense strand
ggauugaauuggccugaaa

SEQ ID NO: 2672547 - RNA, 19 nt, Homo sapiens
  misc_RNA (1)...(19): siRNA sense strand
gcacagugauguuugagua

SEQ ID NO: 2672548 - RNA, 19 nt, Homo sapiens
  misc_RNA (1)...(19): siRNA sense strand
uccaagaaguugcaagaaa

SEQ ID NO: 2672549 - RNA, 19 nt, Homo sapiens
  misc_RNA (1)...(19): siRNA sense strand
auguacaauugcaggauua

SEQ ID NO: 2672550 - RNA, 19 nt, Homo sapiens
  misc_RNA (1)...(19): siRNA sense strand
cuagaauguuugaugggaa

SEQ ID NO: 2672551 - RNA, 19 nt, Homo sapiens
  misc_RNA (1)...(19): siRNA sense strand
guucaucagcagaggaaau

SEQ ID NO: 2672552 - RNA, 19 nt, Homo sapiens
  misc_RNA (1)...(19): siRNA sense strand
ccagaaaauacuugacaaa

SEQ ID NO: 2672553 - RNA, 19 nt, Homo sapiens
  misc_RNA (1)...(19): siRNA sense strand
ggaagugagugcuuggcaa

SEQ ID NO: 2672554 - RNA, 19 nt, Homo sapiens
  misc_RNA (1)...(19): siRNA sense strand
gaggaaucaugauggagaa

SEQ ID NO: 2672555 - RNA, 19 nt, Homo sapiens
  misc_RNA (1)...(19): siRNA sense strand
ggucuuacaaggagcaaau

SEQ ID NO: 2672556 - RNA, 19 nt, Homo sapiens
  misc_RNA (1)...(19): siRNA sense strand
ucacaauagccaagcauau

SEQ ID NO: 2672557 - RNA, 19 nt, Homo sapiens
  misc_RNA (1)...(19): siRNA sense strand
aagaaagaccuucggcuua

SEQ ID NO: 2672558 - RNA, 19 nt, Homo sapiens
  misc_RNA (1)...(19): siRNA sense strand
ggaggaguuucgaaauuua

SEQ ID NO: 2672559 - RNA, 19 nt, Homo sapiens
  misc_RNA (1)...(19): siRNA sense strand
cagaaguggaaauggaaaa

SEQ ID NO: 2672560 - RNA, 19 nt, Homo sapiens
  misc_RNA (1)...(19): siRNA sense strand
uggugagcacugagaguaa

SEQ ID NO: 2672561 - RNA, 19 nt, Homo sapiens
  misc_RNA (1)...(19): siRNA sense strand
aggaaguguaacagaguau

SEQ ID NO: 2672562 - RNA, 19 nt, Homo sapiens
  misc_RNA (1)...(19): siRNA sense strand
caggaggaguuucgaaauu

SEQ ID NO: 2672563 - RNA, 19 nt, Homo sapiens
  misc_RNA (1)...(19): siRNA sense strand
cgggaaauggauuaugaaa

SEQ ID NO: 2672564 - RNA, 19 nt, Homo sapiens
  misc_RNA (1)...(19): siRNA sense strand
aaacagaaguggaaaugga

SEQ ID NO: 2672565 - RNA, 19 nt, Homo sapiens
  misc_RNA (1)...(19): siRNA sense strand
ggacauaaaucuguugaau

SEQ ID NO: 2672566 - RNA, 19 nt, Homo sapiens
  misc_RNA (1)...(19): siRNA sense strand
cgaggaacugagaggaauu

SEQ ID NO: 2672567 - RNA, 19 nt, Homo sapiens
  misc_RNA (1)...(19): siRNA sense strand
ggaaaugaguuguuauaac

SEQ ID NO: 2672568 - RNA, 19 nt, Homo sapiens
  misc_RNA (1)...(19): siRNA sense strand
gcuuggagaugcugugauu

SEQ ID NO: 2672569 - RNA, 19 nt, Homo sapiens
  misc_RNA (1)...(19): siRNA sense strand
uaguaaacugcaagagauu

SEQ ID NO: 2672570 - RNA, 19 nt, Homo sapiens
  misc_RNA (1)...(19): siRNA sense strand
uuaccuaguuacaggagaa

SEQ ID NO: 2672571 - RNA, 19 nt, Homo sapiens
  misc_RNA (1)...(19): siRNA sense strand
ccuaauuggcuuauaaaca

SEQ ID NO: 2672572 - RNA, 19 nt, Homo sapiens
  misc_RNA (1)...(19): siRNA sense strand
gaucaagaccccagagaga

SEQ ID NO: 2672573 - RNA, 19 nt, Homo sapiens
  misc_RNA (1)...(19): siRNA sense strand
gcucacagcuacaggaucu

SEQ ID NO: 2672574 - RNA, 19 nt, Homo sapiens
  misc_RNA (1)...(19): siRNA sense strand
gcaaaugugccuaauggua

SEQ ID NO: 2672575 - RNA, 19 nt, Homo sapiens
  misc_RNA (1)...(19): siRNA sense strand
gcaauuuggaggagaggca

SEQ ID NO: 2672576 - RNA, 19 nt, Homo sapiens
  misc_RNA (1)...(19): siRNA sense strand
gacucagaaucgugugaua

SEQ ID NO: 2672577 - RNA, 19 nt, Homo sapiens
  misc_RNA (1)...(19): siRNA sense strand
ggauuauauucaacugcua

SEQ ID NO: 2672578 - RNA, 19 nt, Homo sapiens
  misc_RNA (1)...(19): siRNA sense strand
augaaacagaaguggaaau

SEQ ID NO: 2672579 - RNA, 19 nt, Homo sapiens
  misc_RNA (1)...(19): siRNA sense strand
acuggaagaucuggagaaa

SEQ ID NO: 2672580 - RNA, 19 nt, Homo sapiens
  misc_RNA (1)...(19): siRNA sense strand
gccuuaacuuccacggaua

SEQ ID NO: 2672581 - RNA, 19 nt, Homo sapiens
  misc_RNA (1)...(19): siRNA sense strand
ugacagaagaugagacaac

SEQ ID NO: 2672582 - RNA, 19 nt, Homo sapiens
  misc_RNA (1)...(19): siRNA sense strand
uggauuuggugucagaaua

SEQ ID NO: 2672583 - RNA, 19 nt, Homo sapiens
  misc_RNA (1)...(19): siRNA sense strand
aggagucacuggacauaaa

SEQ ID NO: 2672584 - RNA, 19 nt, Homo sapiens
  misc_RNA (1)...(19): siRNA sense strand
caacaagaauucuggugca

SEQ ID NO: 2672585 - RNA, 19 nt, Homo sapiens
  misc_RNA (1)...(19): siRNA sense strand
ggauuuggugucagaauau

SEQ ID NO: 2672586 - RNA, 19 nt, Homo sapiens
  misc_RNA (1)...(19): siRNA sense strand
ggagugaguugguaguuga

SEQ ID NO: 2672587 - RNA, 19 nt, Homo sapiens
  misc_RNA (1)...(19): siRNA sense strand
acuuaucaguacuggaauu

SEQ ID NO: 2672588 - RNA, 19 nt, Homo sapiens
  misc_RNA (1)...(19): siRNA sense strand
agacuauuguggaguuauu

SEQ ID NO: 2672589 - RNA, 19 nt, Homo sapiens
  misc_RNA (1)...(19): siRNA sense strand
agucagaugcagucaauau

SEQ ID NO: 2672590 - RNA, 19 nt, Homo sapiens
  misc_RNA (1)...(19): siRNA sense strand
guaguaaacugcaagagau

SEQ ID NO: 2672591 - RNA, 19 nt, Homo sapiens
  misc_RNA (1)...(19): siRNA sense strand
gggaaauggauuaugaaac

SEQ ID NO: 2672592 - RNA, 19 nt, Homo sapiens
  misc_RNA (1)...(19): siRNA sense strand
uggaaauggaaaagggauu

SEQ ID NO: 2672593 - RNA, 19 nt, Homo sapiens
  misc_RNA (1)...(19): siRNA sense strand
gcucuaugguaguaacaca

SEQ ID NO: 2672594 - RNA, 19 nt, Homo sapiens
  misc_RNA (1)...(19): siRNA sense strand
uggaugcuguauugggaaa

SEQ ID NO: 2672595 - RNA, 19 nt, Homo sapiens
  misc_RNA (1)...(19): siRNA sense strand
guucaguaaugcaacgauu

SEQ ID NO: 2672596 - RNA, 19 nt, Homo sapiens
  misc_RNA (1)...(19): siRNA sense strand
gaucauaaacuacgaaugu

SEQ ID NO: 2672597 - RNA, 19 nt, Homo sapiens
  misc_RNA (1)...(19): siRNA sense strand
gcuauagucucgaucauau

SEQ ID NO: 2672598 - RNA, 19 nt, Homo sapiens
  misc_RNA (1)...(19): siRNA sense strand
gccgaggaacugagaggaa

SEQ ID NO: 2672599 - RNA, 19 nt, Homo sapiens
  misc_RNA (1)...(19): siRNA sense strand
cagcucagccuuugaauau

SEQ ID NO: 2672600 - RNA, 19 nt, Homo sapiens
  misc_RNA (1)...(19): siRNA sense strand
cagcauugggacugcaaau

SEQ ID NO: 2672601 - RNA, 19 nt, Homo sapiens
  misc_RNA (1)...(19): siRNA sense strand
ucaguuaauuccagcagua

SEQ ID NO: 2672602 - RNA, 19 nt, Homo sapiens
  misc_RNA (1)...(19): siRNA sense strand
ugacaagguuuuacgacua

SEQ ID NO: 2672603 - RNA, 19 nt, Homo sapiens
  misc_RNA (1)...(19): siRNA sense strand
ccacaaaucgacaaauuga

SEQ ID NO: 2672604 - RNA, 19 nt, Homo sapiens
  misc_RNA (1)...(19): siRNA sense strand
ggacaucaauacuucggaa

SEQ ID NO: 2672605 - RNA, 19 nt, Homo sapiens
  misc_RNA (1)...(19): siRNA sense strand
guuaaugaggcuuggagau

SEQ ID NO: 2672606 - RNA, 19 nt, Homo sapiens
  misc_RNA (1)...(19): siRNA sense strand
aaguaggcaaagaggaauu

SEQ ID NO: 2672607 - RNA, 19 nt, Homo sapiens
  misc_RNA (1)...(19): siRNA sense strand
cagaauauguggaugcugu

SEQ ID NO: 2672608 - RNA, 19 nt, Homo sapiens
  misc_RNA (1)...(19): siRNA sense strand
caagaauucuggugcaagu

SEQ ID NO: 2672609 - RNA, 19 nt, Homo sapiens
  misc_RNA (1)...(19): siRNA sense strand
ccugaaaugauuacugcaa

SEQ ID NO: 2672610 - RNA, 19 nt, Homo sapiens
  misc_RNA (1)...(19): siRNA sense strand
gaugaagcauggcgacuau

SEQ ID NO: 2672611 - RNA, 19 nt, Homo sapiens
  misc_RNA (1)...(19): siRNA sense strand
cauuggagcugauggagga

SEQ ID NO: 2672612 - RNA, 19 nt, Homo sapiens
  misc_RNA (1)...(19): siRNA sense strand
uuaugaaacagaaguggaa

SEQ ID NO: 2672613 - RNA, 19 nt, Homo sapiens
  misc_RNA (1)...(19): siRNA sense strand
ccaagcauaugaagccuua

SEQ ID NO: 2672614 - RNA, 19 nt, Homo sapiens
  misc_RNA (1)...(19): siRNA sense strand
ggugguaguucuuugugaa

SEQ ID NO: 2672615 - RNA, 19 nt, Homo sapiens
  misc_RNA (1)...(19): siRNA sense strand
acaggaucuuguagaguuu

SEQ ID NO: 2672616 - RNA, 19 nt, Homo sapiens
  misc_RNA (1)...(19): siRNA sense strand
gaggauauuuguaguaaac

SEQ ID NO: 2672617 - RNA, 19 nt, Homo sapiens
  misc_RNA (1)...(19): siRNA sense strand
uggacuacuuauacgggaa

SEQ ID NO: 2672618 - RNA, 19 nt, Homo sapiens
  misc_RNA (1)...(19): siRNA sense strand
ggacuacuuauacgggaaa

SEQ ID NO: 2672619 - RNA, 19 nt, Homo sapiens
  misc_RNA (1)...(19): siRNA sense strand
acucuaaggacauguauuu

SEQ ID NO: 2672620 - RNA, 19 nt, Homo sapiens
  misc_RNA (1)...(19): siRNA sense strand
gucuagugcuacagaugaa

SEQ ID NO: 2672621 - RNA, 19 nt, Homo sapiens
  misc_RNA (1)...(19): siRNA sense strand
cuuacaggcuggaugccaa

SEQ ID NO: 2672622 - RNA, 19 nt, Homo sapiens
  misc_RNA (1)...(19): siRNA sense strand
acagaaguggaaauggaaa

SEQ ID NO: 2672623 - RNA, 19 nt, Homo sapiens
  misc_RNA (1)...(19): siRNA sense strand
gugucaggaucauaaacua

SEQ ID NO: 2672624 - RNA, 19 nt, Homo sapiens
  misc_RNA (1)...(19): siRNA sense strand
aaaaugugauggaggauau

SEQ ID NO: 2672625 - RNA, 19 nt, Homo sapiens
  misc_RNA (1)...(19): siRNA sense strand
uaaugagguugugggaaua

SEQ ID NO: 2672626 - RNA, 19 nt, Homo sapiens
  misc_RNA (1)...(19): siRNA sense strand
gauaaggcaacacgggauu

SEQ ID NO: 2672627 - RNA, 19 nt, Homo sapiens
  misc_RNA (1)...(19): siRNA sense strand
agaaacagguucauucauu

SEQ ID NO: 2672628 - RNA, 19 nt, Homo sapiens
  misc_RNA (1)...(19): siRNA sense strand
aguaugucccugugaagaa

SEQ ID NO: 2672629 - RNA, 19 nt, Homo sapiens
  misc_RNA (1)...(19): siRNA sense strand
ugcuggaacuggacacaaa

SEQ ID NO: 2672630 - RNA, 19 nt, Homo sapiens
  misc_RNA (1)...(19): siRNA sense strand
guguaacagaguaugaauu

SEQ ID NO: 2672631 - RNA, 19 nt, Homo sapiens
  misc_RNA (1)...(19): siRNA sense strand
gugcagaccacuuggguau

SEQ ID NO: 2672632 - RNA, 19 nt, Homo sapiens
  misc_RNA (1)...(19): siRNA sense strand
ugaagaggacuuugauaaa

SEQ ID NO: 2672633 - RNA, 19 nt, Homo sapiens
  misc_RNA (1)...(19): siRNA sense strand
augaagaggacuuugauaa

SEQ ID NO: 2672634 - RNA, 19 nt, Homo sapiens
  misc_RNA (1)...(19): siRNA sense strand
ccacuuggguauuuaguuu

SEQ ID NO: 2672635 - RNA, 19 nt, Homo sapiens
  misc_RNA (1)...(19): siRNA sense strand
ucaacuacugggagacaaa

SEQ ID NO: 2672636 - RNA, 19 nt, Homo sapiens
  misc_RNA (1)...(19): siRNA sense strand
cgaaacagugagaugaaga

SEQ ID NO: 2672637 - RNA, 19 nt, Homo sapiens
  misc_RNA (1)...(19): siRNA sense strand
ccaagaaacugaucucauu

SEQ ID NO: 2672638 - RNA, 19 nt, Homo sapiens
  misc_RNA (1)...(19): siRNA sense strand
ugaacuacccagugauuau

SEQ ID NO: 2672639 - RNA, 19 nt, Homo sapiens
  misc_RNA (1)...(19): siRNA sense strand
uggugacccugaugggaaa

SEQ ID NO: 2672640 - RNA, 19 nt, Homo sapiens
  misc_RNA (1)...(19): siRNA sense strand
gcacagccaauaugacuua

SEQ ID NO: 2672641 - RNA, 19 nt, Homo sapiens
  misc_RNA (1)...(19): siRNA sense strand
agugagaugaagaggacuu

SEQ ID NO: 2672642 - RNA, 19 nt, Homo sapiens
  misc_RNA (1)...(19): siRNA sense strand
gaugaagaggacuuugaua

SEQ ID NO: 2672643 - RNA, 19 nt, Homo sapiens
  misc_RNA (1)...(19): siRNA sense strand
aaaucaaagcugugugguu

SEQ ID NO: 2672644 - RNA, 19 nt, Homo sapiens
  misc_RNA (1)...(19): siRNA sense strand
cugaaaugcugguggugcu

SEQ ID NO: 2672645 - RNA, 19 nt, Homo sapiens
  misc_RNA (1)...(19): siRNA sense strand
gccaucaacuacugggaga

SEQ ID NO: 2672646 - RNA, 19 nt, Homo sapiens
  misc_RNA (1)...(19): siRNA sense strand
cugugguggaggugaguuu

SEQ ID NO: 2672647 - RNA, 19 nt, Homo sapiens
  misc_RNA (1)...(19): siRNA sense strand
aucuauagcuuacgaaaca

SEQ ID NO: 2672648 - RNA, 19 nt, Homo sapiens
  misc_RNA (1)...(19): siRNA sense strand
guaauauucucauggaucu

SEQ ID NO: 2672649 - RNA, 19 nt, Homo sapiens
  misc_RNA (1)...(19): siRNA sense strand
gauuaugaacagagggguu

SEQ ID NO: 2672650 - RNA, 19 nt, Homo sapiens
  misc_RNA (1)...(19): siRNA sense strand
uguugauccucuugucuua

SEQ ID NO: 2672651 - RNA, 19 nt, Homo sapiens
  misc_RNA (1)...(19): siRNA sense strand
ccucugaacuacccaguga

SEQ ID NO: 2672652 - RNA, 19 nt, Homo sapiens
  misc_RNA (1)...(19): siRNA sense strand
aaaacuauggcgaagaaaa

SEQ ID NO: 2672653 - RNA, 19 nt, Homo sapiens
  misc_RNA (1)...(19): siRNA sense strand
guggugacccugaugggaa

SEQ ID NO: 2672654 - RNA, 19 nt, Homo sapiens
  misc_RNA (1)...(19): siRNA sense strand
gagaugaagaggacuuuga

SEQ ID NO: 2672655 - RNA, 19 nt, Homo sapiens
  misc_RNA (1)...(19): siRNA sense strand
gaucaugagcucagagaaa

SEQ ID NO: 2672656 - RNA, 19 nt, Homo sapiens
  misc_RNA (1)...(19): siRNA sense strand
agagagaauuuguguguaa

SEQ ID NO: 2672657 - RNA, 19 nt, Homo sapiens
  misc_RNA (1)...(19): siRNA sense strand
agagaagagucuagaaaga

SEQ ID NO: 2672658 - RNA, 19 nt, Homo sapiens
  misc_RNA (1)...(19): siRNA sense strand
agauggaguuaguaagaaa

SEQ ID NO: 2672659 - RNA, 19 nt, Homo sapiens
  misc_RNA (1)...(19): siRNA sense strand
agaagagucuagaaagaaa

SEQ ID NO: 2672660 - RNA, 19 nt, Homo sapiens
  misc_RNA (1)...(19): siRNA sense strand
ccacauacaucaaagaauu

SEQ ID NO: 2672661 - RNA, 19 nt, Homo sapiens
  misc_RNA (1)...(19): siRNA sense strand
guagauacuccuagugaaa

SEQ ID NO: 2672662 - RNA, 19 nt, Homo sapiens
  misc_RNA (1)...(19): siRNA sense strand
ggagaggagaagagaagua

SEQ ID NO: 2672663 - RNA, 19 nt, Homo sapiens
  misc_RNA (1)...(19): siRNA sense strand
gcucaaagaugccuuaaua

SEQ ID NO: 2672664 - RNA, 19 nt, Homo sapiens
  misc_RNA (1)...(19): siRNA sense strand
uauuauggcuauacggaaa

SEQ ID NO: 2672665 - RNA, 19 nt, Homo sapiens
  misc_RNA (1)...(19): siRNA sense strand
gauugaaagugauuggcaa

SEQ ID NO: 2672666 - RNA, 19 nt, Homo sapiens
  misc_RNA (1)...(19): siRNA sense strand
ggacugaacaacaaagaau

SEQ ID NO: 2672667 - RNA, 19 nt, Homo sapiens
  misc_RNA (1)...(19): siRNA sense strand
cagaaaagccaguguggaa

SEQ ID NO: 2672668 - RNA, 19 nt, Homo sapiens
  misc_RNA (1)...(19): siRNA sense strand
gaugagacuuugacuauaa

SEQ ID NO: 2672669 - RNA, 19 nt, Homo sapiens
  misc_RNA (1)...(19): siRNA sense strand
guaagaaaucagaagucaa

SEQ ID NO: 2672670 - RNA, 19 nt, Homo sapiens
  misc_RNA (1)...(19): siRNA sense strand
gaaacaacuuccuuugaaa

SEQ ID NO: 2672671 - RNA, 19 nt, Homo sapiens
  misc_RNA (1)...(19): siRNA sense strand
agaaagggaugaauggcua

SEQ ID NO: 2672672 - RNA, 19 nt, Homo sapiens
  misc_RNA (1)...(19): siRNA sense strand
gaaaaugaaaccagcaaua

SEQ ID NO: 2672673 - RNA, 19 nt, Homo sapiens
  misc_RNA (1)...(19): siRNA sense strand
ggaugaacagugcaagaaa

SEQ ID NO: 2672674 - RNA, 19 nt, Homo sapiens
  misc_RNA (1)...(19): siRNA sense strand
gcacuggacugaacaacaa

SEQ ID NO: 2672675 - RNA, 19 nt, Homo sapiens
  misc_RNA (1)...(19): siRNA sense strand
gaaaaugggaaaaggagua

SEQ ID NO: 2672676 - RNA, 19 nt, Homo sapiens
  misc_RNA (1)...(19): siRNA sense strand
ggaugaagauaauggaaug

SEQ ID NO: 2672677 - RNA, 19 nt, Homo sapiens
  misc_RNA (1)...(19): siRNA sense strand
agaaaguguuuguggaugu

SEQ ID NO: 2672678 - RNA, 19 nt, Homo sapiens
  misc_RNA (1)...(19): siRNA sense strand
caauagaagaguaugccaa

SEQ ID NO: 2672679 - RNA, 19 nt, Homo sapiens
  misc_RNA (1)...(19): siRNA sense strand
gcacagaagcacaggccca

SEQ ID NO: 2672680 - RNA, 19 nt, Homo sapiens
  misc_RNA (1)...(19): siRNA sense strand
caaagacucuacaaagaaa

SEQ ID NO: 2672681 - RNA, 19 nt, Homo sapiens
  misc_RNA (1)...(19): siRNA sense strand
ccuaaacgggcuucagaaa

SEQ ID NO: 2672682 - RNA, 19 nt, Homo sapiens
  misc_RNA (1)...(19): siRNA sense strand
ucucaaaagaagaggaaga

SEQ ID NO: 2672683 - RNA, 19 nt, Homo sapiens
  misc_RNA (1)...(19): siRNA sense strand
ugaaggaacuggaggaaag

SEQ ID NO: 2672684 - RNA, 19 nt, Homo sapiens
  misc_RNA (1)...(19): siRNA sense strand
gaagcgauuuccagggcaa

SEQ ID NO: 2672685 - RNA, 19 nt, Homo sapiens
  misc_RNA (1)...(19): siRNA sense strand
cuggaaugaaggucagaaa

SEQ ID NO: 2672686 - RNA, 19 nt, Homo sapiens
  misc_RNA (1)...(19): siRNA sense strand
agcaggaacagguggauaa

SEQ ID NO: 2672687 - RNA, 19 nt, Homo sapiens
  misc_RNA (1)...(19): siRNA sense strand
gagcugagucuuuggauga

SEQ ID NO: 2672688 - RNA, 19 nt, Homo sapiens
  misc_RNA (1)...(19): siRNA sense strand
uggaaagauuguaugccaa

SEQ ID NO: 2672689 - RNA, 19 nt, Homo sapiens
  misc_RNA (1)...(19): siRNA sense strand
cuucagauggaguuaguaa

SEQ ID NO: 2672690 - RNA, 19 nt, Homo sapiens
  misc_RNA (1)...(19): siRNA sense strand
ggaauuagcugaaagcacu

SEQ ID NO: 2672691 - RNA, 19 nt, Homo sapiens
  misc_RNA (1)...(19): siRNA sense strand
gagcagaaggggauugaaa

SEQ ID NO: 2672692 - RNA, 19 nt, Homo sapiens
  misc_RNA (1)...(19): siRNA sense strand
gcaaagacucuacaaagaa

SEQ ID NO: 2672693 - RNA, 19 nt, Homo sapiens
  misc_RNA (1)...(19): siRNA sense strand
aggaaauaccagaguacga

SEQ ID NO: 2672694 - RNA, 19 nt, Homo sapiens
  misc_RNA (1)...(19): siRNA sense strand
caacaguucugaugaagau

SEQ ID NO: 2672695 - RNA, 19 nt, Homo sapiens
  misc_RNA (1)...(19): siRNA sense strand
aagauaaacaggaugaaga

SEQ ID NO: 2672696 - RNA, 19 nt, Homo sapiens
  misc_RNA (1)...(19): siRNA sense strand
gcuggagauuacagagaca

SEQ ID NO: 2672697 - RNA, 19 nt, Homo sapiens
  misc_RNA (1)...(19): siRNA sense strand
agaaaugaaugguggcugu

SEQ ID NO: 2672698 - RNA, 19 nt, Homo sapiens
  misc_RNA (1)...(19): siRNA sense strand
gcaaaaggaaucuguuaua

SEQ ID NO: 2672699 - RNA, 19 nt, Homo sapiens
  misc_RNA (1)...(19): siRNA sense strand
ucagagaagagucuagaaa

SEQ ID NO: 2672700 - RNA, 19 nt, Homo sapiens
  misc_RNA (1)...(19): siRNA sense strand
gagcaucccaggaggaaca

SEQ ID NO: 2672701 - RNA, 19 nt, Homo sapiens
  misc_RNA (1)...(19): siRNA sense strand
caacaaagaauugcugaua

SEQ ID NO: 2672702 - RNA, 19 nt, Homo sapiens
  misc_RNA (1)...(19): siRNA sense strand
cuaaccaagcccagagcaa

SEQ ID NO: 2672703 - RNA, 19 nt, Homo sapiens
  misc_RNA (1)...(19): siRNA sense strand
ggaagggcauaaacaggaa

SEQ ID NO: 2672704 - RNA, 19 nt, Homo sapiens
  misc_RNA (1)...(19): siRNA sense strand
caguaaaauugaugagacu

SEQ ID NO: 2672705 - RNA, 19 nt, Homo sapiens
  misc_RNA (1)...(19): siRNA sense strand
cuguaauucaaauggacaa

SEQ ID NO: 2672706 - RNA, 19 nt, Homo sapiens
  misc_RNA (1)...(19): siRNA sense strand
acaaagaauugcugauauc

SEQ ID NO: 2672707 - RNA, 19 nt, Homo sapiens
  misc_RNA (1)...(19): siRNA sense strand
aggcagacucagaaaauaa

SEQ ID NO: 2672708 - RNA, 19 nt, Homo sapiens
  misc_RNA (1)...(19): siRNA sense strand
aggaacagguggauaaaau

SEQ ID NO: 2672709 - RNA, 19 nt, Homo sapiens
  misc_RNA (1)...(19): siRNA sense strand
cugcuauggauguggaaaa

SEQ ID NO: 2672710 - RNA, 19 nt, Homo sapiens
  misc_RNA (1)...(19): siRNA sense strand
uggaagauaaacaggauga

SEQ ID NO: 2672711 - RNA, 19 nt, Homo sapiens
  misc_RNA (1)...(19): siRNA sense strand
aggaugaagauaauggaau

SEQ ID NO: 2672712 - RNA, 19 nt, Homo sapiens
  misc_RNA (1)...(19): siRNA sense strand
ugcaaagacucuacaaaga

SEQ ID NO: 2672713 - RNA, 19 nt, Homo sapiens
  misc_RNA (1)...(19): siRNA sense strand
ggaggacgcugaugcaaau

SEQ ID NO: 2672714 - RNA, 19 nt, Homo sapiens
  misc_RNA (1)...(19): siRNA sense strand
caaauguguaugagguaga

SEQ ID NO: 2672715 - RNA, 19 nt, Homo sapiens
  misc_RNA (1)...(19): siRNA sense strand
ccuaagcagcucaaauuaa

SEQ ID NO: 2672716 - RNA, 19 nt, Homo sapiens
  misc_RNA (1)...(19): siRNA sense strand
ccucaaaugcaaaaggaau

SEQ ID NO: 2672717 - RNA, 19 nt, Homo sapiens
  misc_RNA (1)...(19): siRNA sense strand
guaaacccaucaaggcaua

SEQ ID NO: 2672718 - RNA, 19 nt, Homo sapiens
  misc_RNA (1)...(19): siRNA sense strand
acagaaugaucuuggucuu

SEQ ID NO: 2672719 - RNA, 19 nt, Homo sapiens
  misc_RNA (1)...(19): siRNA sense strand
agauaaacaggaugaagau

SEQ ID NO: 2672720 - RNA, 19 nt, Homo sapiens
  misc_RNA (1)...(19): siRNA sense strand
aggaacuggaggaaagaau

SEQ ID NO: 2672721 - RNA, 19 nt, Homo sapiens
  misc_RNA (1)...(19): siRNA sense strand
gaugaacagugcaagaaaa

SEQ ID NO: 2672722 - RNA, 19 nt, Homo sapiens
  misc_RNA (1)...(19): siRNA sense strand
guggaaagauuguaugcca

SEQ ID NO: 2672723 - RNA, 19 nt, Homo sapiens
  misc_RNA (1)...(19): siRNA sense strand
uguacagaucaaagggcaa

SEQ ID NO: 2672724 - RNA, 19 nt, Homo sapiens
  misc_RNA (1)...(19): siRNA sense strand
cuucugcagccgagauaaa

SEQ ID NO: 2672725 - RNA, 19 nt, Homo sapiens
  misc_RNA (1)...(19): siRNA sense strand
gcaccuuacaagucuguua

SEQ ID NO: 2672726 - RNA, 19 nt, Homo sapiens
  misc_RNA (1)...(19): siRNA sense strand
uggcagaauuccagcagca

SEQ ID NO: 2672727 - RNA, 19 nt, Homo sapiens
  misc_RNA (1)...(19): siRNA sense strand
uggaggacgcugaugcaaa

SEQ ID NO: 2672728 - RNA, 19 nt, Homo sapiens
  misc_RNA (1)...(19): siRNA sense strand
augagaauuccgagucuaa

SEQ ID NO: 2672729 - RNA, 19 nt, Homo sapiens
  misc_RNA (1)...(19): siRNA sense strand
ggauagaagcauuucagga

SEQ ID NO: 2672730 - RNA, 19 nt, Homo sapiens
  misc_RNA (1)...(19): siRNA sense strand
ccacagucgacaaagaaaa

SEQ ID NO: 2672731 - RNA, 19 nt, Homo sapiens
  misc_RNA (1)...(19): siRNA sense strand
aagcugggccauagagaga

SEQ ID NO: 2672732 - RNA, 19 nt, Homo sapiens
  misc_RNA (1)...(19): siRNA sense strand
uagaagaggagcucaaaga

SEQ ID NO: 2672733 - RNA, 19 nt, Homo sapiens
  misc_RNA (1)...(19): siRNA sense strand
cuuagucaauucacagaaa

SEQ ID NO: 2672734 - RNA, 19 nt, Homo sapiens
  misc_RNA (1)...(19): siRNA sense strand
gagaagagaaguaaaccca

SEQ ID NO: 2672735 - RNA, 19 nt, Homo sapiens
  misc_RNA (1)...(19): siRNA sense strand
gcauauugauuuccgggau

SEQ ID NO: 2672736 - RNA, 19 nt, Homo sapiens
  misc_RNA (1)...(19): siRNA sense strand
agaaaucagaagucaaaga

SEQ ID NO: 2672737 - RNA, 19 nt, Homo sapiens
  misc_RNA (1)...(19): siRNA sense strand
aaggcauauuccacagaaa

SEQ ID NO: 2672738 - RNA, 19 nt, Homo sapiens
  misc_RNA (1)...(19): siRNA sense strand
cugagaggauccagaggaa

SEQ ID NO: 2672739 - RNA, 19 nt, Homo sapiens
  misc_RNA (1)...(19): siRNA sense strand
aagacaauucacagggaaa

SEQ ID NO: 2672740 - RNA, 19 nt, Homo sapiens
  misc_RNA (1)...(19): siRNA sense strand
ggaaaaugcacaaaaggaa

SEQ ID NO: 2672741 - RNA, 19 nt, Homo sapiens
  misc_RNA (1)...(19): siRNA sense strand
guccugaagagaagagaaa

SEQ ID NO: 2672742 - RNA, 19 nt, Homo sapiens
  misc_RNA (1)...(19): siRNA sense strand
gcauguaacagaagagcga

SEQ ID NO: 2672743 - RNA, 19 nt, Homo sapiens
  misc_RNA (1)...(19): siRNA sense strand
ggucagggucagagaggga

SEQ ID NO: 2672744 - RNA, 19 nt, Homo sapiens
  misc_RNA (1)...(19): siRNA sense strand
ccagaauugaaaagagaaa

SEQ ID NO: 2672745 - RNA, 19 nt, Homo sapiens
  misc_RNA (1)...(19): siRNA sense strand
caggaaaggcaacagcaaa

SEQ ID NO: 2672746 - RNA, 19 nt, Homo sapiens
  misc_RNA (1)...(19): siRNA sense strand
gaaaaugcacaaaaggaaa

SEQ ID NO: 2672747 - RNA, 19 nt, Homo sapiens
  misc_RNA (1)...(19): siRNA sense strand
gauucaagucugugcaaaa

SEQ ID NO: 2672748 - RNA, 19 nt, Homo sapiens
  misc_RNA (1)...(19): siRNA sense strand
augaagagcaaauggccua

SEQ ID NO: 2672749 - RNA, 19 nt, Homo sapiens
  misc_RNA (1)...(19): siRNA sense strand
gauauaagggaccgggaga

SEQ ID NO: 2672750 - RNA, 19 nt, Homo sapiens
  misc_RNA (1)...(19): siRNA sense strand
ggggaaauccuucaagaaa

SEQ ID NO: 2672751 - RNA, 19 nt, Homo sapiens
  misc_RNA (1)...(19): siRNA sense strand
ugauaaagaaagugcaugu

SEQ ID NO: 2672752 - RNA, 19 nt, Homo sapiens
  misc_RNA (1)...(19): siRNA sense strand
ugacagacagcaagcggaa

SEQ ID NO: 2672753 - RNA, 19 nt, Homo sapiens
  misc_RNA (1)...(19): siRNA sense strand
ccagcuuggcucugauaaa

SEQ ID NO: 2672754 - RNA, 19 nt, Homo sapiens
  misc_RNA (1)...(19): siRNA sense strand
cugcaggauuaaaugguuu

SEQ ID NO: 2672755 - RNA, 19 nt, Homo sapiens
  misc_RNA (1)...(19): siRNA sense strand
ugucagucuugguguggaa

SEQ ID NO: 2672756 - RNA, 19 nt, Homo sapiens
  misc_RNA (1)...(19): siRNA sense strand
ggaucgggccuguggacuu

SEQ ID NO: 2672757 - RNA, 19 nt, Homo sapiens
  misc_RNA (1)...(19): siRNA sense strand
gcaucuaugacauuguaaa

SEQ ID NO: 2672758 - RNA, 19 nt, Homo sapiens
  misc_RNA (1)...(19): siRNA sense strand
agaaagugcauguaacaga

SEQ ID NO: 2672759 - RNA, 19 nt, Homo sapiens
  misc_RNA (1)...(19): siRNA sense strand
gacagaaaauagaagacaa

SEQ ID NO: 2672760 - RNA, 19 nt, Homo sapiens
  misc_RNA (1)...(19): siRNA sense strand
gaagacaauucacagggaa

SEQ ID NO: 2672761 - RNA, 19 nt, Homo sapiens
  misc_RNA (1)...(19): siRNA sense strand
gacuaggagaggagcagaa

SEQ ID NO: 2672762 - RNA, 19 nt, Homo sapiens
  misc_RNA (1)...(19): siRNA sense strand
agaagagcgaggucguaaa

SEQ ID NO: 2672763 - RNA, 19 nt, Homo sapiens
  misc_RNA (1)...(19): siRNA sense strand
ugaagagaagagaaaggaa

SEQ ID NO: 2672764 - RNA, 19 nt, Homo sapiens
  misc_RNA (1)...(19): siRNA sense strand
gaagagaagagaaaggaac

SEQ ID NO: 2672765 - RNA, 19 nt, Homo sapiens
  misc_RNA (1)...(19): siRNA sense strand
gcaaaggccaagcagaaaa

SEQ ID NO: 2672766 - RNA, 19 nt, Homo sapiens
  misc_RNA (1)...(19): siRNA sense strand
uggccagccucuaguguau

SEQ ID NO: 2672767 - RNA, 19 nt, Homo sapiens
  misc_RNA (1)...(19): siRNA sense strand
aggaugagccagccacuaa

SEQ ID NO: 2672768 - RNA, 19 nt, Homo sapiens
  misc_RNA (1)...(19): siRNA sense strand
cagaagagcgaggucguaa

SEQ ID NO: 2672769 - RNA, 19 nt, Homo sapiens
  misc_RNA (1)...(19): siRNA sense strand
gcucaagugaugaagaacu

SEQ ID NO: 2672770 - RNA, 19 nt, Homo sapiens
  misc_RNA (1)...(19): siRNA sense strand
cccaagaaacccucagauu

SEQ ID NO: 2672771 - RNA, 19 nt, Homo sapiens
  misc_RNA (1)...(19): siRNA sense strand
ccagaggagacuagaaauc

SEQ ID NO: 2672772 - RNA, 19 nt, Homo sapiens
  misc_RNA (1)...(19): siRNA sense strand
ccauggacacccacagcua

SEQ ID NO: 2672773 - RNA, 19 nt, Homo sapiens
  misc_RNA (1)...(19): siRNA sense strand
aaggcaaaguagggaauau

SEQ ID NO: 2672774 - RNA, 19 nt, Homo sapiens
  misc_RNA (1)...(19): siRNA sense strand
ggguaacagggcaucuaua

SEQ ID NO: 2672775 - RNA, 19 nt, Homo sapiens
  misc_RNA (1)...(19): siRNA sense strand
acugauagaagaaagccaa

SEQ ID NO: 2672776 - RNA, 19 nt, Homo sapiens
  misc_RNA (1)...(19): siRNA sense strand
aggaaaggcaacagcaaac

SEQ ID NO: 2672777 - RNA, 19 nt, Homo sapiens
  misc_RNA (1)...(19): siRNA sense strand
ucaggaaaggcaacagcaa

SEQ ID NO: 2672778 - RNA, 19 nt, Homo sapiens
  misc_RNA (1)...(19): siRNA sense strand
gcaaacaguagaaaagaca

SEQ ID NO: 2672779 - RNA, 19 nt, Homo sapiens
  misc_RNA (1)...(19): siRNA sense strand
gggaaaaugcacaaaagga

SEQ ID NO: 2672780 - RNA, 19 nt, Homo sapiens
  misc_RNA (1)...(19): siRNA sense strand
cugcagacccucagcuuca

SEQ ID NO: 2672781 - RNA, 19 nt, Homo sapiens
  misc_RNA (1)...(19): siRNA sense strand
cugagaauuaugagccaga

SEQ ID NO: 2672782 - RNA, 19 nt, Homo sapiens
  misc_RNA (1)...(19): siRNA sense strand
gaucaauagcccagcuucu

SEQ ID NO: 2672783 - RNA, 19 nt, Homo sapiens
  misc_RNA (1)...(19): siRNA sense strand
agagcgaggucguaaacca

SEQ ID NO: 2672784 - RNA, 19 nt, Homo sapiens
  misc_RNA (1)...(19): siRNA sense strand
ccuguggacuucagcucaa

SEQ ID NO: 2672785 - RNA, 19 nt, Homo sapiens
  misc_RNA (1)...(19): siRNA sense strand
acagaaaaguuuaggacuc

SEQ ID NO: 2672786 - RNA, 19 nt, Homo sapiens
  misc_RNA (1)...(19): siRNA sense strand
gaacggucugaauggacaa

SEQ ID NO: 2672787 - RNA, 19 nt, Homo sapiens
  misc_RNA (1)...(19): siRNA sense strand
ccucacuguucaugcugua

SEQ ID NO: 2672788 - RNA, 19 nt, Homo sapiens
  misc_RNA (1)...(19): siRNA sense strand
cugagaggauccagaggaa

SEQ ID NO: 2672789 - RNA, 19 nt, Homo sapiens
  misc_RNA (1)...(19): siRNA sense strand
aagacaauucacagggaaa

SEQ ID NO: 2672790 - RNA, 19 nt, Homo sapiens
  misc_RNA (1)...(19): siRNA sense strand
ggaaaaugcacaaaaggaa

SEQ ID NO: 2672791 - RNA, 19 nt, Homo sapiens
  misc_RNA (1)...(19): siRNA sense strand
guccugaagagaagagaaa

SEQ ID NO: 2672792 - RNA, 19 nt, Homo sapiens
  misc_RNA (1)...(19): siRNA sense strand
gcauguaacagaagagcga

SEQ ID NO: 2672793 - RNA, 19 nt, Homo sapiens
  misc_RNA (1)...(19): siRNA sense strand
ggucagggucagagaggga

SEQ ID NO: 2672794 - RNA, 19 nt, Homo sapiens
  misc_RNA (1)...(19): siRNA sense strand
ccagaauugaaaagagaaa

SEQ ID NO: 2672795 - RNA, 19 nt, Homo sapiens
  misc_RNA (1)...(19): siRNA sense strand
caggaaaggcaacagcaaa

SEQ ID NO: 2672796 - RNA, 19 nt, Homo sapiens
  misc_RNA (1)...(19): siRNA sense strand
gaaaaugcacaaaaggaaa

SEQ ID NO: 2672797 - RNA, 19 nt, Homo sapiens
  misc_RNA (1)...(19): siRNA sense strand
gauucaagucugugcaaaa

SEQ ID NO: 2672798 - RNA, 19 nt, Homo sapiens
  misc_RNA (1)...(19): siRNA sense strand
augaagagcaaauggccua

SEQ ID NO: 2672799 - RNA, 19 nt, Homo sapiens
  misc_RNA (1)...(19): siRNA sense strand
gauauaagggaccgggaga

SEQ ID NO: 2672800 - RNA, 19 nt, Homo sapiens
  misc_RNA (1)...(19): siRNA sense strand
ggggaaauccuucaagaaa

SEQ ID NO: 2672801 - RNA, 19 nt, Homo sapiens
  misc_RNA (1)...(19): siRNA sense strand
ugauaaagaaagugcaugu

SEQ ID NO: 2672802 - RNA, 19 nt, Homo sapiens
  misc_RNA (1)...(19): siRNA sense strand
ugacagacagcaagcggaa

SEQ ID NO: 2672803 - RNA, 19 nt, Homo sapiens
  misc_RNA (1)...(19): siRNA sense strand
ccagcuuggcucugauaaa

SEQ ID NO: 2672804 - RNA, 19 nt, Homo sapiens
  misc_RNA (1)...(19): siRNA sense strand
cugcaggauuaaaugguuu

SEQ ID NO: 2672805 - RNA, 19 nt, Homo sapiens
  misc_RNA (1)...(19): siRNA sense strand
ugucagucuugguguggaa

SEQ ID NO: 2672806 - RNA, 19 nt, Homo sapiens
  misc_RNA (1)...(19): siRNA sense strand
ggaucgggccuguggacuu

SEQ ID NO: 2672807 - RNA, 19 nt, Homo sapiens
  misc_RNA (1)...(19): siRNA sense strand
gcaucuaugacauuguaaa

SEQ ID NO: 2672808 - RNA, 19 nt, Homo sapiens
  misc_RNA (1)...(19): siRNA sense strand
agaaagugcauguaacaga

SEQ ID NO: 2672809 - RNA, 19 nt, Homo sapiens
  misc_RNA (1)...(19): siRNA sense strand
gacagaaaauagaagacaa

SEQ ID NO: 2672810 - RNA, 19 nt, Homo sapiens
  misc_RNA (1)...(19): siRNA sense strand
gaagacaauucacagggaa

SEQ ID NO: 2672811 - RNA, 19 nt, Homo sapiens
  misc_RNA (1)...(19): siRNA sense strand
gacuaggagaggagcagaa

SEQ ID NO: 2672812 - RNA, 19 nt, Homo sapiens
  misc_RNA (1)...(19): siRNA sense strand
agaagagcgaggucguaaa

SEQ ID NO: 2672813 - RNA, 19 nt, Homo sapiens
  misc_RNA (1)...(19): siRNA sense strand
ugaagagaagagaaaggaa

SEQ ID NO: 2672814 - RNA, 19 nt, Homo sapiens
  misc_RNA (1)...(19): siRNA sense strand
gaagagaagagaaaggaac

SEQ ID NO: 2672815 - RNA, 19 nt, Homo sapiens
  misc_RNA (1)...(19): siRNA sense strand
gcaaaggccaagcagaaaa

SEQ ID NO: 2672816 - RNA, 19 nt, Homo sapiens
  misc_RNA (1)...(19): siRNA sense strand
uggccagccucuaguguau

SEQ ID NO: 2672817 - RNA, 19 nt, Homo sapiens
  misc_RNA (1)...(19): siRNA sense strand
aggaugagccagccacuaa

SEQ ID NO: 2672818 - RNA, 19 nt, Homo sapiens
  misc_RNA (1)...(19): siRNA sense strand
cagaagagcgaggucguaa

SEQ ID NO: 2672819 - RNA, 19 nt, Homo sapiens
  misc_RNA (1)...(19): siRNA sense strand
gcucaagugaugaagaacu

SEQ ID NO: 2672820 - RNA, 19 nt, Homo sapiens
  misc_RNA (1)...(19): siRNA sense strand
cccaagaaacccucagauu

SEQ ID NO: 2672821 - RNA, 19 nt, Homo sapiens
  misc_RNA (1)...(19): siRNA sense strand
ccagaggagacuagaaauc

SEQ ID NO: 2672822 - RNA, 19 nt, Homo sapiens
  misc_RNA (1)...(19): siRNA sense strand
ccauggacacccacagcua

SEQ ID NO: 2672823 - RNA, 19 nt, Homo sapiens
  misc_RNA (1)...(19): siRNA sense strand
aaggcaaaguagggaauau

SEQ ID NO: 2672824 - RNA, 19 nt, Homo sapiens
  misc_RNA (1)...(19): siRNA sense strand
ggguaacagggcaucuaua

SEQ ID NO: 2672825 - RNA, 19 nt, Homo sapiens
  misc_RNA (1)...(19): siRNA sense strand
acugauagaagaaagccaa

SEQ ID NO: 2672826 - RNA, 19 nt, Homo sapiens
  misc_RNA (1)...(19): siRNA sense strand
aggaaaggcaacagcaaac

SEQ ID NO: 2672827 - RNA, 19 nt, Homo sapiens
  misc_RNA (1)...(19): siRNA sense strand
ucaggaaaggcaacagcaa

SEQ ID NO: 2672828 - RNA, 19 nt, Homo sapiens
  misc_RNA (1)...(19): siRNA sense strand
gcaaacaguagaaaagaca

SEQ ID NO: 2672829 - RNA, 19 nt, Homo sapiens
  misc_RNA (1)...(19): siRNA sense strand
gggaaaaugcacaaaagga

SEQ ID NO: 2672830 - RNA, 19 nt, Homo sapiens
  misc_RNA (1)...(19): siRNA sense strand
cugcagacccucagcuuca

SEQ ID NO: 2672831 - RNA, 19 nt, Homo sapiens
  misc_RNA (1)...(19): siRNA sense strand
cugagaauuaugagccaga

SEQ ID NO: 2672832 - RNA, 19 nt, Homo sapiens
  misc_RNA (1)...(19): siRNA sense strand
gaucaauagcccagcuucu

SEQ ID NO: 2672833 - RNA, 19 nt, Homo sapiens
  misc_RNA (1)...(19): siRNA sense strand
agagcgaggucguaaacca

SEQ ID NO: 2672834 - RNA, 19 nt, Homo sapiens
  misc_RNA (1)...(19): siRNA sense strand
ccuguggacuucagcucaa

SEQ ID NO: 2672835 - RNA, 19 nt, Homo sapiens
  misc_RNA (1)...(19): siRNA sense strand
acagaaaaguuuaggacuc

SEQ ID NO: 2672836 - RNA, 19 nt, Homo sapiens
  misc_RNA (1)...(19): siRNA sense strand
gaacggucugaauggacaa

SEQ ID NO: 2672837 - RNA, 19 nt, Homo sapiens
  misc_RNA (1)...(19): siRNA sense strand
ccucacuguucaugcugua

SEQ ID NO: 2672838 - RNA, 19 nt, Homo sapiens
  misc_RNA (1)...(19): siRNA sense strand
acaucaaagucaagugaau

SEQ ID NO: 2672839 - RNA, 19 nt, Homo sapiens
  misc_RNA (1)...(19): siRNA sense strand
agucaagauuagaugucaa

SEQ ID NO: 2672840 - RNA, 19 nt, Homo sapiens
  misc_RNA (1)...(19): siRNA sense strand
cugaaagagcaggaagaua

SEQ ID NO: 2672841 - RNA, 19 nt, Homo sapiens
  misc_RNA (1)...(19): siRNA sense strand
gugccaaguugcagggacu

SEQ ID NO: 2672842 - RNA, 19 nt, Homo sapiens
  misc_RNA (1)...(19): siRNA sense strand
gagaaacaucugaagccaa

SEQ ID NO: 2672843 - RNA, 19 nt, Homo sapiens
  misc_RNA (1)...(19): siRNA sense strand
cuauuuaaaggaagagaga

SEQ ID NO: 2672844 - RNA, 19 nt, Homo sapiens
  misc_RNA (1)...(19): siRNA sense strand
auuuaaaggaagagagaug

SEQ ID NO: 2672845 - RNA, 19 nt, Homo sapiens
  misc_RNA (1)...(19): siRNA sense strand
cugaggagagaaacagaaa

SEQ ID NO: 2672846 - RNA, 19 nt, Homo sapiens
  misc_RNA (1)...(19): siRNA sense strand
gaggagagaaacagaaaau

SEQ ID NO: 2672847 - RNA, 19 nt, Homo sapiens
  misc_RNA (1)...(19): siRNA sense strand
ggagcugaggagagaaaca

SEQ ID NO: 2672848 - RNA, 19 nt, Homo sapiens
  misc_RNA (1)...(19): siRNA sense strand
gauuagaugucaauggacu

SEQ ID NO: 2672849 - RNA, 19 nt, Homo sapiens
  misc_RNA (1)...(19): siRNA sense strand
ccuccaacucugaaaucaa

SEQ ID NO: 2672850 - RNA, 19 nt, Homo sapiens
  misc_RNA (1)...(19): siRNA sense strand
ugaucggcauguugguaaa

SEQ ID NO: 2672851 - RNA, 19 nt, Homo sapiens
  misc_RNA (1)...(19): siRNA sense strand
aucagaaaccaaauggaaa

SEQ ID NO: 2672852 - RNA, 19 nt, Homo sapiens
  misc_RNA (1)...(19): siRNA sense strand
uauuaaugcuguagagccu

SEQ ID NO: 2672853 - RNA, 19 nt, Homo sapiens
  misc_RNA (1)...(19): siRNA sense strand
auggagcugaggagagaaa

SEQ ID NO: 2672854 - RNA, 19 nt, Homo sapiens
  misc_RNA (1)...(19): siRNA sense strand
cugaagaauuugaaaacca

SEQ ID NO: 2672855 - RNA, 19 nt, Homo sapiens
  misc_RNA (1)...(19): siRNA sense strand
gaguccaagcugccagaaa

SEQ ID NO: 2672856 - RNA, 19 nt, Homo sapiens
  misc_RNA (1)...(19): siRNA sense strand
ggaagauauugcauggucu

SEQ ID NO: 2672857 - RNA, 19 nt, Homo sapiens
  misc_RNA (1)...(19): siRNA sense strand
ggucguaaugccagaaugu

SEQ ID NO: 2672858 - RNA, 19 nt, Homo sapiens
  misc_RNA (1)...(19): siRNA sense strand
aguccaagcugccagaaaa

SEQ ID NO: 2672859 - RNA, 19 nt, Homo sapiens
  misc_RNA (1)...(19): siRNA sense strand
auaaugaacuacuacgaga

SEQ ID NO: 2672860 - RNA, 19 nt, Homo sapiens
  misc_RNA (1)...(19): siRNA sense strand
gaaaucaaaaccagagaau

SEQ ID NO: 2672861 - RNA, 19 nt, Homo sapiens
  misc_RNA (1)...(19): siRNA sense strand
caccaaaugugaucggcau

SEQ ID NO: 2672862 - RNA, 19 nt, Homo sapiens
  misc_RNA (1)...(19): siRNA sense strand
agcaaauacccaacagaga

SEQ ID NO: 2672863 - RNA, 19 nt, Homo sapiens
  misc_RNA (1)...(19): siRNA sense strand
ucguaaugccagaauguca

SEQ ID NO: 2672864 - RNA, 19 nt, Homo sapiens
  misc_RNA (1)...(19): siRNA sense strand
aaucaaaaccagagaauug

SEQ ID NO: 2672865 - RNA, 19 nt, Homo sapiens
  misc_RNA (1)...(19): siRNA sense strand
uugaagaaacauuggaaac

SEQ ID NO: 2672866 - RNA, 19 nt, Homo sapiens
  misc_RNA (1)...(19): siRNA sense strand
auuagaugucaauggacua

SEQ ID NO: 2672867 - RNA, 19 nt, Homo sapiens
  misc_RNA (1)...(19): siRNA sense strand
aguccuacaaaucaagaaa

SEQ ID NO: 2672868 - RNA, 19 nt, Homo sapiens
  misc_RNA (1)...(19): siRNA sense strand
gcugaggagagaaacagaa

SEQ ID NO: 2672869 - RNA, 19 nt, Homo sapiens
  misc_RNA (1)...(19): siRNA sense strand
augcacauaccguggauuu

SEQ ID NO: 2672870 - RNA, 19 nt, Homo sapiens
  misc_RNA (1)...(19): siRNA sense strand
aaagaacguacucaggaaa

SEQ ID NO: 2672871 - RNA, 19 nt, Homo sapiens
  misc_RNA (1)...(19): siRNA sense strand
ucagaaaccaaauggaaac

SEQ ID NO: 2672872 - RNA, 19 nt, Homo sapiens
  misc_RNA (1)...(19): siRNA sense strand
uaaugaacuacuacgagaa

SEQ ID NO: 2672873 - RNA, 19 nt, Homo sapiens
  misc_RNA (1)...(19): siRNA sense strand
cuguuauugcccugaagaa

SEQ ID NO: 2672874 - RNA, 19 nt, Homo sapiens
  misc_RNA (1)...(19): siRNA sense strand
caucagaauuggagcaaaa

SEQ ID NO: 2672875 - RNA, 19 nt, Homo sapiens
  misc_RNA (1)...(19): siRNA sense strand
ugauaagaauagaggcaga

SEQ ID NO: 2672876 - RNA, 19 nt, Homo sapiens
  misc_RNA (1)...(19): siRNA sense strand
agaaauuggaucagaaaca

SEQ ID NO: 2672877 - RNA, 19 nt, Homo sapiens
  misc_RNA (1)...(19): siRNA sense strand
cuacagaauuauggugaaa

SEQ ID NO: 2672878 - RNA, 19 nt, Homo sapiens
  misc_RNA (1)...(19): siRNA sense strand
gauuauuugccuacagaaa

SEQ ID NO: 2672879 - RNA, 19 nt, Homo sapiens
  misc_RNA (1)...(19): siRNA sense strand
cugaaaugauugccacaaa

SEQ ID NO: 2672880 - RNA, 19 nt, Homo sapiens
  misc_RNA (1)...(19): siRNA sense strand
gcaugauauuggaagaaca

SEQ ID NO: 2672881 - RNA, 19 nt, Homo sapiens
  misc_RNA (1)...(19): siRNA sense strand
ucauaaagcaggagauagu

SEQ ID NO: 2672882 - RNA, 19 nt, Homo sapiens
  misc_RNA (1)...(19): siRNA sense strand
ggaaagauguagaagcugu

SEQ ID NO: 2672883 - RNA, 19 nt, Homo sapiens
  misc_RNA (1)...(19): siRNA sense strand
aggagaaauuggaucagaa

SEQ ID NO: 2672884 - RNA, 19 nt, Homo sapiens
  misc_RNA (1)...(19): siRNA sense strand
cugcagugccacauagaaa

SEQ ID NO: 2672885 - RNA, 19 nt, Homo sapiens
  misc_RNA (1)...(19): siRNA sense strand
gaugauaagaauagaggca

SEQ ID NO: 2672886 - RNA, 19 nt, Homo sapiens
  misc_RNA (1)...(19): siRNA sense strand
ggaucauaauguagguuca

SEQ ID NO: 2672887 - RNA, 19 nt, Homo sapiens
  misc_RNA (1)...(19): siRNA sense strand
agaagaugacaguugaaua

SEQ ID NO: 2672888 - RNA, 19 nt, Homo sapiens
  misc_RNA (1)...(19): siRNA sense strand
cgucagaggcagauauuca

SEQ ID NO: 2672889 - RNA, 19 nt, Homo sapiens
  misc_RNA (1)...(19): siRNA sense strand
cagaacaaaggaagaguau

SEQ ID NO: 2672890 - RNA, 19 nt, Homo sapiens
  misc_RNA (1)...(19): siRNA sense strand
cugaaagggacaugcagaa

SEQ ID NO: 2672891 - RNA, 19 nt, Homo sapiens
  misc_RNA (1)...(19): siRNA sense strand
ggauagauuaugaagggau

SEQ ID NO: 2672892 - RNA, 19 nt, Homo sapiens
  misc_RNA (1)...(19): siRNA sense strand
agaaacaaaucuugaagca

SEQ ID NO: 2672893 - RNA, 19 nt, Homo sapiens
  misc_RNA (1)...(19): siRNA sense strand
uguacaaguugaaugacaa

SEQ ID NO: 2672894 - RNA, 19 nt, Homo sapiens
  misc_RNA (1)...(19): siRNA sense strand
uggaugggccaaugaguua

SEQ ID NO: 2672895 - RNA, 19 nt, Homo sapiens
  misc_RNA (1)...(19): siRNA sense strand
gagaaggugaacugaagaa

SEQ ID NO: 2672896 - RNA, 19 nt, Homo sapiens
  misc_RNA (1)...(19): siRNA sense strand
gcugaaugcacuacaguuu

SEQ ID NO: 2672897 - RNA, 19 nt, Homo sapiens
  misc_RNA (1)...(19): siRNA sense strand
guguacaaguugaaugaca

SEQ ID NO: 2672898 - RNA, 19 nt, Homo sapiens
  misc_RNA (1)...(19): siRNA sense strand
acagagaagauucgaauau

SEQ ID NO: 2672899 - RNA, 19 nt, Homo sapiens
  misc_RNA (1)...(19): siRNA sense strand
caguaaugccaaugaagau

SEQ ID NO: 2672900 - RNA, 19 nt, Homo sapiens
  misc_RNA (1)...(19): siRNA sense strand
cugcaaugucauagcaaca

SEQ ID NO: 2672901 - RNA, 19 nt, Homo sapiens
  misc_RNA (1)...(19): siRNA sense strand
caaaaguggcucaggagaa

SEQ ID NO: 2672902 - RNA, 19 nt, Homo sapiens
  misc_RNA (1)...(19): siRNA sense strand
gaaccuacacagagcucua

SEQ ID NO: 2672903 - RNA, 19 nt, Homo sapiens
  misc_RNA (1)...(19): siRNA sense strand
ccuacagaauuauggugaa

SEQ ID NO: 2672904 - RNA, 19 nt, Homo sapiens
  misc_RNA (1)...(19): siRNA sense strand
uguucgaguugauggcuua

SEQ ID NO: 2672905 - RNA, 19 nt, Homo sapiens
  misc_RNA (1)...(19): siRNA sense strand
agaaagugauggaagugau

SEQ ID NO: 2672906 - RNA, 19 nt, Homo sapiens
  misc_RNA (1)...(19): siRNA sense strand
gggaucaucaagaaacaaa

SEQ ID NO: 2672907 - RNA, 19 nt, Homo sapiens
  misc_RNA (1)...(19): siRNA sense strand
gaguacaugugaagaacca

SEQ ID NO: 2672908 - RNA, 19 nt, Homo sapiens
  misc_RNA (1)...(19): siRNA sense strand
gaugaaaaguggaaaagga

SEQ ID NO: 2672909 - RNA, 19 nt, Homo sapiens
  misc_RNA (1)...(19): siRNA sense strand
caagauaugcagagucaca

SEQ ID NO: 2672910 - RNA, 19 nt, Homo sapiens
  misc_RNA (1)...(19): siRNA sense strand
guauuauaguacagagucu

SEQ ID NO: 2672911 - RNA, 19 nt, Homo sapiens
  misc_RNA (1)...(19): siRNA sense strand
aucagaaacaagugacaaa

SEQ ID NO: 2672912 - RNA, 19 nt, Homo sapiens
  misc_RNA (1)...(19): siRNA sense strand
uuaaacaggaacuggcuaa

SEQ ID NO: 2672913 - RNA, 19 nt, Homo sapiens
  misc_RNA (1)...(19): siRNA sense strand
aaugaguacaugugaagaa

SEQ ID NO: 2672914 - RNA, 19 nt, Homo sapiens
  misc_RNA (1)...(19): siRNA sense strand
agaauuuggaguuggauga

SEQ ID NO: 2672915 - RNA, 19 nt, Homo sapiens
  misc_RNA (1)...(19): siRNA sense strand
augaagaaguacuccagaa

SEQ ID NO: 2672916 - RNA, 19 nt, Homo sapiens
  misc_RNA (1)...(19): siRNA sense strand
ggaaaauaagugaagauga

SEQ ID NO: 2672917 - RNA, 19 nt, Homo sapiens
  misc_RNA (1)...(19): siRNA sense strand
ggaaaugaaaccauagagu

SEQ ID NO: 2672918 - RNA, 19 nt, Homo sapiens
  misc_RNA (1)...(19): siRNA sense strand
auuagaaagugauggaagu

SEQ ID NO: 2672919 - RNA, 19 nt, Homo sapiens
  misc_RNA (1)...(19): siRNA sense strand
gcuuaacacuggaaaugau

SEQ ID NO: 2672920 - RNA, 19 nt, Homo sapiens
  misc_RNA (1)...(19): siRNA sense strand
acacacaaacagagaagga

SEQ ID NO: 2672921 - RNA, 19 nt, Homo sapiens
  misc_RNA (1)...(19): siRNA sense strand
gcuuaaugcuaaaguuugu

SEQ ID NO: 2672922 - RNA, 19 nt, Homo sapiens
  misc_RNA (1)...(19): siRNA sense strand
agggaugaaaaguggaaaa

SEQ ID NO: 2672923 - RNA, 19 nt, Homo sapiens
  misc_RNA (1)...(19): siRNA sense strand
caagugaagacaacgcaaa

SEQ ID NO: 2672924 - RNA, 19 nt, Homo sapiens
  misc_RNA (1)...(19): siRNA sense strand
aaggaaagauguagaagcu

SEQ ID NO: 2672925 - RNA, 19 nt, Homo sapiens
  misc_RNA (1)...(19): siRNA sense strand
cuacagagaagauucgaau

SEQ ID NO: 2672926 - RNA, 19 nt, Homo sapiens
  misc_RNA (1)...(19): siRNA sense strand
gcagaggcucacuuggaaa

SEQ ID NO: 2672927 - RNA, 19 nt, Homo sapiens
  misc_RNA (1)...(19): siRNA sense strand
aguugaaagcuaugguaca

SEQ ID NO: 2672928 - RNA, 19 nt, Homo sapiens
  misc_RNA (1)...(19): siRNA sense strand
gguuagacuugcagauuuc

SEQ ID NO: 2672929 - RNA, 19 nt, Homo sapiens
  misc_RNA (1)...(19): siRNA sense strand
gaaagauguagaagcugua

SEQ ID NO: 2672930 - RNA, 19 nt, Homo sapiens
  misc_RNA (1)...(19): siRNA sense strand
ggaucagaaacaagugaca

SEQ ID NO: 2672931 - RNA, 19 nt, Homo sapiens
  misc_RNA (1)...(19): siRNA sense strand
aaucagagucacacuuaaa

SEQ ID NO: 2672932 - RNA, 19 nt, Homo sapiens
  misc_RNA (1)...(19): siRNA sense strand
gaguauggcuccugaaccu

SEQ ID NO: 2672933 - RNA, 19 nt, Homo sapiens
  misc_RNA (1)...(19): siRNA sense strand
cacaaacagagaaggacua

SEQ ID NO: 2672934 - RNA, 19 nt, Homo sapiens
  misc_RNA (1)...(19): siRNA sense strand
gauuaugaagggaugaaaa

SEQ ID NO: 2672935 - RNA, 19 nt, Homo sapiens
  misc_RNA (1)...(19): siRNA sense strand
cugugaaacuggagugaaa

SEQ ID NO: 2672936 - RNA, 19 nt, Homo sapiens
  misc_RNA (1)...(19): siRNA sense strand
ggacagagauaaauggaca

SEQ ID NO: 2672937 - RNA, 19 nt, Homo sapiens
  misc_RNA (1)...(19): siRNA sense strand
agaaugaaugcaagagaaa

SEQ ID NO: 2672938 - RNA, 19 nt, Homo sapiens
  misc_RNA (1)...(19): siRNA sense strand
acagaaauguggugggcuu

SEQ ID NO: 2672939 - RNA, 19 nt, Homo sapiens
  misc_RNA (1)...(19): siRNA sense strand
gaggaaacugagaggagaa

SEQ ID NO: 2672940 - RNA, 19 nt, Homo sapiens
  misc_RNA (1)...(19): siRNA sense strand
ccaccaaguuugaaggcuu

SEQ ID NO: 2672941 - RNA, 19 nt, Homo sapiens
  misc_RNA (1)...(19): siRNA sense strand
agcaaauaguacagaguau

SEQ ID NO: 2672942 - RNA, 19 nt, Homo sapiens
  misc_RNA (1)...(19): siRNA sense strand
ugaagagaucagacagaaa

SEQ ID NO: 2672943 - RNA, 19 nt, Homo sapiens
  misc_RNA (1)...(19): siRNA sense strand
cuuccuaaauggaggguca

SEQ ID NO: 2672944 - RNA, 19 nt, Homo sapiens
  misc_RNA (1)...(19): siRNA sense strand
auaugaagguauccagaaa

SEQ ID NO: 2672945 - RNA, 19 nt, Homo sapiens
  misc_RNA (1)...(19): siRNA sense strand
gggaagaaugaaugcaaga

SEQ ID NO: 2672946 - RNA, 19 nt, Homo sapiens
  misc_RNA (1)...(19): siRNA sense strand
aagcacugacggugagaaa

SEQ ID NO: 2672947 - RNA, 19 nt, Homo sapiens
  misc_RNA (1)...(19): siRNA sense strand
gcuauguaugugagugaaa

SEQ ID NO: 2672948 - RNA, 19 nt, Homo sapiens
  misc_RNA (1)...(19): siRNA sense strand
gggcaacauaugaagguau

SEQ ID NO: 2672949 - RNA, 19 nt, Homo sapiens
  misc_RNA (1)...(19): siRNA sense strand
uccaaaaggucgugaggaa

SEQ ID NO: 2672950 - RNA, 19 nt, Homo sapiens
  misc_RNA (1)...(19): siRNA sense strand
agauaagaaagcuggguuu

SEQ ID NO: 2672951 - RNA, 19 nt, Homo sapiens
  misc_RNA (1)...(19): siRNA sense strand
cuggagaaccacuggaaau

SEQ ID NO: 2672952 - RNA, 19 nt, Homo sapiens
  misc_RNA (1)...(19): siRNA sense strand
ccaucaaagaaguggcaga

SEQ ID NO: 2672953 - RNA, 19 nt, Homo sapiens
  misc_RNA (1)...(19): siRNA sense strand
ggauauaauugauagucca

SEQ ID NO: 2672954 - RNA, 19 nt, Homo sapiens
  misc_RNA (1)...(19): siRNA sense strand
aaugaaugcaagagaaaga

SEQ ID NO: 2672955 - RNA, 19 nt, Homo sapiens
  misc_RNA (1)...(19): siRNA sense strand
acugagaggagaagaucaa

SEQ ID NO: 2672956 - RNA, 19 nt, Homo sapiens
  misc_RNA (1)...(19): siRNA sense strand
gagaagaucaagaggugga

SEQ ID NO: 2672957 - RNA, 19 nt, Homo sapiens
  misc_RNA (1)...(19): siRNA sense strand
ugauaaagcaguagcagca

SEQ ID NO: 2672958 - RNA, 19 nt, Homo sapiens
  misc_RNA (1)...(19): siRNA sense strand
ugcaagagaaagaggaaga

SEQ ID NO: 2672959 - RNA, 19 nt, Homo sapiens
  misc_RNA (1)...(19): siRNA sense strand
aauggagggucaagggcaa

SEQ ID NO: 2672960 - RNA, 19 nt, Homo sapiens
  misc_RNA (1)...(19): siRNA sense strand
uugcagaccuacuggaaga

SEQ ID NO: 2672961 - RNA, 19 nt, Homo sapiens
  misc_RNA (1)...(19): siRNA sense strand
acacauacaacaagacaga

SEQ ID NO: 2672962 - RNA, 19 nt, Homo sapiens
  misc_RNA (1)...(19): siRNA sense strand
agacggugacacuggaaua

SEQ ID NO: 2672963 - RNA, 19 nt, Homo sapiens
  misc_RNA (1)...(19): siRNA sense strand
ugaaaguggcagagaccau

SEQ ID NO: 2672964 - RNA, 19 nt, Homo sapiens
  misc_RNA (1)...(19): siRNA sense strand
uggaagagaaccaagaaga

SEQ ID NO: 2672965 - RNA, 19 nt, Homo sapiens
  misc_RNA (1)...(19): siRNA sense strand
gacaagaagucuauagcca

SEQ ID NO: 2672966 - RNA, 19 nt, Homo sapiens
  misc_RNA (1)...(19): siRNA sense strand
uugacaaggcugugcgaau

SEQ ID NO: 2672967 - RNA, 19 nt, Homo sapiens
  misc_RNA (1)...(19): siRNA sense strand
ggacucuaauuaugggaga

SEQ ID NO: 2672968 - RNA, 19 nt, Homo sapiens
  misc_RNA (1)...(19): siRNA sense strand
gagugguagaagaaauuaa

SEQ ID NO: 2672969 - RNA, 19 nt, Homo sapiens
  misc_RNA (1)...(19): siRNA sense strand
ucaaaggaggucaaugaaa

SEQ ID NO: 2672970 - RNA, 19 nt, Homo sapiens
  misc_RNA (1)...(19): siRNA sense strand
cugaaggaaucaaggccau

SEQ ID NO: 2672971 - RNA, 19 nt, Homo sapiens
  misc_RNA (1)...(19): siRNA sense strand
cagcugaagaggugaaagu

SEQ ID NO: 2672972 - RNA, 19 nt, Homo sapiens
  misc_RNA (1)...(19): siRNA sense strand
uuucaaaggaggucaauga

SEQ ID NO: 2672973 - RNA, 19 nt, Homo sapiens
  misc_RNA (1)...(19): siRNA sense strand
cagaugcagacgauggaaa

SEQ ID NO: 2672974 - RNA, 19 nt, Homo sapiens
  misc_RNA (1)...(19): siRNA sense strand
caacaucauuccaggcuca

SEQ ID NO: 2672975 - RNA, 19 nt, Homo sapiens
  misc_RNA (1)...(19): siRNA sense strand
aagaaguggcagaagccua

SEQ ID NO: 2672976 - RNA, 19 nt, Homo sapiens
  misc_RNA (1)...(19): siRNA sense strand
caucaaagaaguggcagaa

SEQ ID NO: 2672977 - RNA, 19 nt, Homo sapiens
  misc_RNA (1)...(19): siRNA sense strand
cagacgauggaaagacuua

SEQ ID NO: 2672978 - RNA, 19 nt, Homo sapiens
  misc_RNA (1)...(19): siRNA sense strand
gcaauaccuuagugcucaa

SEQ ID NO: 2672979 - RNA, 19 nt, Homo sapiens
  misc_RNA (1)...(19): siRNA sense strand
guugaagagaucagacaga

SEQ ID NO: 2672980 - RNA, 19 nt, Homo sapiens
  misc_RNA (1)...(19): siRNA sense strand
gaugaaaauuggugaucca

SEQ ID NO: 2672981 - RNA, 19 nt, Homo sapiens
  misc_RNA (1)...(19): siRNA sense strand
gugaaacuggagugaaaga

SEQ ID NO: 2672982 - RNA, 19 nt, Homo sapiens
  misc_RNA (1)...(19): siRNA sense strand
aguuaaacaaucuggcuuu

SEQ ID NO: 2672983 - RNA, 19 nt, Homo sapiens
  misc_RNA (1)...(19): siRNA sense strand
ggaaaagcacugacgguga

SEQ ID NO: 2672984 - RNA, 19 nt, Homo sapiens
  misc_RNA (1)...(19): siRNA sense strand
cccauuuggcggaguuaaa

SEQ ID NO: 2672985 - RNA, 19 nt, Homo sapiens
  misc_RNA (1)...(19): siRNA sense strand
gcugaugauggcuuggaua

SEQ ID NO: 2672986 - RNA, 19 nt, Homo sapiens
  misc_RNA (1)...(19): siRNA sense strand
auaaauggacagaugguca

SEQ ID NO: 2672987 - RNA, 19 nt, Homo sapiens
  misc_RNA (1)...(19): siRNA sense strand
gggugagacgucaguggua

SEQ ID NO: 2672988 - RNA, 19 nt, Homo sapiens
  misc_RNA (1)...(19): siRNA sense strand
gcaaagagggccaccgagu

SEQ ID NO: 2672989 - RNA, 19 nt, Homo sapiens
  misc_RNA (1)...(19): siRNA sense strand
aagagugguagaagaaauu

SEQ ID NO: 2672990 - RNA, 19 nt, Homo sapiens
  misc_RNA (1)...(19): siRNA sense strand
aagcuauguaugugaguga

SEQ ID NO: 2672991 - RNA, 19 nt, Homo sapiens
  misc_RNA (1)...(19): siRNA sense strand
ccgugggugcagagcuaaa

SEQ ID NO: 2672992 - RNA, 19 nt, Homo sapiens
  misc_RNA (1)...(19): siRNA sense strand
acucuaauuaugggagaua

SEQ ID NO: 2672993 - RNA, 19 nt, Homo sapiens
  misc_RNA (1)...(19): siRNA sense strand
aaaggaaaaugcugagauu

SEQ ID NO: 2672994 - RNA, 19 nt, Homo sapiens
  misc_RNA (1)...(19): siRNA sense strand
gagaaauaccugaaggaga

SEQ ID NO: 2672995 - RNA, 19 nt, Homo sapiens
  misc_RNA (1)...(19): siRNA sense strand
ggcaauuacuggauggaau

SEQ ID NO: 2672996 - RNA, 19 nt, Homo sapiens
  misc_RNA (1)...(19): siRNA sense strand
gaguaacaccugagggaca

SEQ ID NO: 2672997 - RNA, 19 nt, Homo sapiens
  misc_RNA (1)...(19): siRNA sense strand
cugaaagaccacuggacua

SEQ ID NO: 2672998 - RNA, 19 nt, Homo sapiens
  misc_RNA (1)...(19): siRNA sense strand
ugucuaaagagcagagaau

SEQ ID NO: 2672999 - RNA, 19 nt, Homo sapiens
  misc_RNA (1)...(19): siRNA sense strand
ccagucuguuagagagaaa

SEQ ID NO: 2673000 - RNA, 19 nt, Homo sapiens
  misc_RNA (1)...(19): siRNA sense strand
agaaggaagaagaaacuaa

SEQ ID NO: 2673001 - RNA, 19 nt, Homo sapiens
  misc_RNA (1)...(19): siRNA sense strand
cuaaauggaccaagcacaa

SEQ ID NO: 2673002 - RNA, 19 nt, Homo sapiens
  misc_RNA (1)...(19): siRNA sense strand
gggcuauguacgaaugaua

SEQ ID NO: 2673003 - RNA, 19 nt, Homo sapiens
  misc_RNA (1)...(19): siRNA sense strand
cagaaaacuuggaguaaca

SEQ ID NO: 2673004 - RNA, 19 nt, Homo sapiens
  misc_RNA (1)...(19): siRNA sense strand
gagacaaguauguuggaau

SEQ ID NO: 2673005 - RNA, 19 nt, Homo sapiens
  misc_RNA (1)...(19): siRNA sense strand
gcauauaguauuaguacca

SEQ ID NO: 2673006 - RNA, 19 nt, Homo sapiens
  misc_RNA (1)...(19): siRNA sense strand
guacaaaagguuacugaaa

SEQ ID NO: 2673007 - RNA, 19 nt, Homo sapiens
  misc_RNA (1)...(19): siRNA sense strand
uugcaaauguagaagccaa

SEQ ID NO: 2673008 - RNA, 19 nt, Homo sapiens
  misc_RNA (1)...(19): siRNA sense strand
ggaucuuauuagugaacuu

SEQ ID NO: 2673009 - RNA, 19 nt, Homo sapiens
  misc_RNA (1)...(19): siRNA sense strand
cugaaauugaccagagaga

SEQ ID NO: 2673010 - RNA, 19 nt, Homo sapiens
  misc_RNA (1)...(19): siRNA sense strand
gcugaagcuagaagggcaa

SEQ ID NO: 2673011 - RNA, 19 nt, Homo sapiens
  misc_RNA (1)...(19): siRNA sense strand
cuuauagugagaugagaaa

SEQ ID NO: 2673012 - RNA, 19 nt, Homo sapiens
  misc_RNA (1)...(19): siRNA sense strand
uuucgaaggccaaagaaua

SEQ ID NO: 2673013 - RNA, 19 nt, Homo sapiens
  misc_RNA (1)...(19): siRNA sense strand
aagagugauuucugacaaa

SEQ ID NO: 2673014 - RNA, 19 nt, Homo sapiens
  misc_RNA (1)...(19): siRNA sense strand
ucucaaggcaauagagcau

SEQ ID NO: 2673015 - RNA, 19 nt, Homo sapiens
  misc_RNA (1)...(19): siRNA sense strand
uguaugagcacuugggaga

SEQ ID NO: 2673016 - RNA, 19 nt, Homo sapiens
  misc_RNA (1)...(19): siRNA sense strand
gaggaguaucugugucaaa

SEQ ID NO: 2673017 - RNA, 19 nt, Homo sapiens
  misc_RNA (1)...(19): siRNA sense strand
gacaaggaaauuauggaaa

SEQ ID NO: 2673018 - RNA, 19 nt, Homo sapiens
  misc_RNA (1)...(19): siRNA sense strand
gcagcaaggcauuuggauu

SEQ ID NO: 2673019 - RNA, 19 nt, Homo sapiens
  misc_RNA (1)...(19): siRNA sense strand
cugaagaaaaccaagaaaa

SEQ ID NO: 2673020 - RNA, 19 nt, Homo sapiens
  misc_RNA (1)...(19): siRNA sense strand
gcugaagaucucaccaaua

SEQ ID NO: 2673021 - RNA, 19 nt, Homo sapiens
  misc_RNA (1)...(19): siRNA sense strand
acuuagagaacgaguccaa

SEQ ID NO: 2673022 - RNA, 19 nt, Homo sapiens
  misc_RNA (1)...(19): siRNA sense strand
gcagaaaauucaugccgaa

SEQ ID NO: 2673023 - RNA, 19 nt, Homo sapiens
  misc_RNA (1)...(19): siRNA sense strand
uccauuaguugcaaggaaa

SEQ ID NO: 2673024 - RNA, 19 nt, Homo sapiens
  misc_RNA (1)...(19): siRNA sense strand
ccagcaugguggaagguga

SEQ ID NO: 2673025 - RNA, 19 nt, Homo sapiens
  misc_RNA (1)...(19): siRNA sense strand
gguggaaggugauugccaa

SEQ ID NO: 2673026 - RNA, 19 nt, Homo sapiens
  misc_RNA (1)...(19): siRNA sense strand
gaagcaugguuguggcuga

SEQ ID NO: 2673027 - RNA, 19 nt, Homo sapiens
  misc_RNA (1)...(19): siRNA sense strand
ccucaacuuuguagagcau

SEQ ID NO: 2673028 - RNA, 19 nt, Homo sapiens
  misc_RNA (1)...(19): siRNA sense strand
ucuugauccuauagcauua

SEQ ID NO: 2673029 - RNA, 19 nt, Homo sapiens
  misc_RNA (1)...(19): siRNA sense strand
acuuauagugagaugagaa

SEQ ID NO: 2673030 - RNA, 19 nt, Homo sapiens
  misc_RNA (1)...(19): siRNA sense strand
caucagaaaacuuggagua

SEQ ID NO: 2673031 - RNA, 19 nt, Homo sapiens
  misc_RNA (1)...(19): siRNA sense strand
acccaaaauuauagagaca

SEQ ID NO: 2673032 - RNA, 19 nt, Homo sapiens
  misc_RNA (1)...(19): siRNA sense strand
uggauaaauuugcugaaga

SEQ ID NO: 2673033 - RNA, 19 nt, Homo sapiens
  misc_RNA (1)...(19): siRNA sense strand
gugcaggcuuguugaacuu

SEQ ID NO: 2673034 - RNA, 19 nt, Homo sapiens
  misc_RNA (1)...(19): siRNA sense strand
gagagaaauaccugaagga

SEQ ID NO: 2673035 - RNA, 19 nt, Homo sapiens
  misc_RNA (1)...(19): siRNA sense strand
gggaaauuaaggaccaaaa

SEQ ID NO: 2673036 - RNA, 19 nt, Homo sapiens
  misc_RNA (1)...(19): siRNA sense strand
agaauauacaucuccgaaa

SEQ ID NO: 2673037 - RNA, 19 nt, Homo sapiens
  misc_RNA (1)...(19): siRNA sense strand
guaacaagauugcacccaa

SEQ ID NO: 2673038 - RNA, 19 nt, Homo sapiens
  misc_RNA (1)...(19): siRNA sense strand
uagugaacuuagagaacga

SEQ ID NO: 2673039 - RNA, 19 nt, Homo sapiens
  misc_RNA (1)...(19): siRNA sense strand
ccagaauuucgaaggccaa

SEQ ID NO: 2673040 - RNA, 19 nt, Homo sapiens
  misc_RNA (1)...(19): siRNA sense strand
aagaaaagaaagagaagga

SEQ ID NO: 2673041 - RNA, 19 nt, Homo sapiens
  misc_RNA (1)...(19): siRNA sense strand
aaaagaaagagaaggaaga

SEQ ID NO: 2673042 - RNA, 19 nt, Homo sapiens
  misc_RNA (1)...(19): siRNA sense strand
ggugauugccaaauucaaa

SEQ ID NO: 2673043 - RNA, 19 nt, Homo sapiens
  misc_RNA (1)...(19): siRNA sense strand
auuacuggauggaaugaua

SEQ ID NO: 2673044 - RNA, 19 nt, Homo sapiens
  misc_RNA (1)...(19): siRNA sense strand
augucuaucuacaggaauu

SEQ ID NO: 2673045 - RNA, 19 nt, Homo sapiens
  misc_RNA (1)...(19): siRNA sense strand
guggaaggugauugccaaa

SEQ ID NO: 2673046 - RNA, 19 nt, Homo sapiens
  misc_RNA (1)...(19): siRNA sense strand
agucuguuagagagaaaua

SEQ ID NO: 2673047 - RNA, 19 nt, Homo sapiens
  misc_RNA (1)...(19): siRNA sense strand
auaugaggcugaaacuaaa

SEQ ID NO: 2673048 - RNA, 19 nt, Homo sapiens
  misc_RNA (1)...(19): siRNA sense strand
cagaaagcucaaucacuua

SEQ ID NO: 2673049 - RNA, 19 nt, Homo sapiens
  misc_RNA (1)...(19): siRNA sense strand
uuuagaguccuaugagaua

SEQ ID NO: 2673050 - RNA, 19 nt, Homo sapiens
  misc_RNA (1)...(19): siRNA sense strand
gaacacauggcacgggaau

SEQ ID NO: 2673051 - RNA, 19 nt, Homo sapiens
  misc_RNA (1)...(19): siRNA sense strand
cagcaaggcauuuggauuc

SEQ ID NO: 2673052 - RNA, 19 nt, Homo sapiens
  misc_RNA (1)...(19): siRNA sense strand
ugacaaggaaauuauggaa

SEQ ID NO: 2673053 - RNA, 19 nt, Homo sapiens
  misc_RNA (1)...(19): siRNA sense strand
uugaaaaguucuugcugaa

SEQ ID NO: 2673054 - RNA, 19 nt, Homo sapiens
  misc_RNA (1)...(19): siRNA sense strand
gcuaugacaaggaaauuau

SEQ ID NO: 2673055 - RNA, 19 nt, Homo sapiens
  misc_RNA (1)...(19): siRNA sense strand
gagcauauguucuacagga

SEQ ID NO: 2673056 - RNA, 19 nt, Homo sapiens
  misc_RNA (1)...(19): siRNA sense strand
cagacaagacugcggcuga

SEQ ID NO: 2673057 - RNA, 19 nt, Homo sapiens
  misc_RNA (1)...(19): siRNA sense strand
aggaauuugcacauaguau

SEQ ID NO: 2673058 - RNA, 19 nt, Homo sapiens
  misc_RNA (1)...(19): siRNA sense strand
ugcaaauguagaagccaaa

SEQ ID NO: 2673059 - RNA, 19 nt, Homo sapiens
  misc_RNA (1)...(19): siRNA sense strand
agagaaggaagaagaaacu

SEQ ID NO: 2673060 - RNA, 19 nt, Homo sapiens
  misc_RNA (1)...(19): siRNA sense strand
cggcauauugcuaauucaa

SEQ ID NO: 2673061 - RNA, 19 nt, Homo sapiens
  misc_RNA (1)...(19): siRNA sense strand
ggaucaguaucgggaguuu

SEQ ID NO: 2673062 - RNA, 19 nt, Homo sapiens
  misc_RNA (1)...(19): siRNA sense strand
agacuauguaugagcacuu

SEQ ID NO: 2673063 - RNA, 19 nt, Homo sapiens
  misc_RNA (1)...(19): siRNA sense strand
agaaagagaucgaggccuu

SEQ ID NO: 2673064 - RNA, 19 nt, Homo sapiens
  misc_RNA (1)...(19): siRNA sense strand
gguucaaauuccagcggua

SEQ ID NO: 2673065 - RNA, 19 nt, Homo sapiens
  misc_RNA (1)...(19): siRNA sense strand
ggacacaggugaagccuca

SEQ ID NO: 2673066 - RNA, 19 nt, Homo sapiens
  misc_RNA (1)...(19): siRNA sense strand
acaaaggguuuaaagguga

SEQ ID NO: 2673067 - RNA, 19 nt, Homo sapiens
  misc_RNA (1)...(19): siRNA sense strand
ggagaaggaggaagagcga

SEQ ID NO: 2673068 - RNA, 19 nt, Homo sapiens
  misc_RNA (1)...(19): siRNA sense strand
gguuuaaaggugagcggga

SEQ ID NO: 2673069 - RNA, 19 nt, Homo sapiens
  misc_RNA (1)...(19): siRNA sense strand
gcuccaugacagagaggau

SEQ ID NO: 2673070 - RNA, 19 nt, Homo sapiens
  misc_RNA (1)...(19): siRNA sense strand
acgaaagcggccagaaaga

SEQ ID NO: 2673071 - RNA, 19 nt, Homo sapiens
  misc_RNA (1)...(19): siRNA sense strand
gcaagaaggugcugguggu

SEQ ID NO: 2673072 - RNA, 19 nt, Homo sapiens
  misc_RNA (1)...(19): siRNA sense strand
cggaggaguuugagagcug

SEQ ID NO: 2673073 - RNA, 19 nt, Homo sapiens
  misc_RNA (1)...(19): siRNA sense strand
agugcgacauggagugcaa

SEQ ID NO: 2673074 - RNA, 19 nt, Homo sapiens
  misc_RNA (1)...(19): siRNA sense strand
uggcugaguucaaccgcaa

SEQ ID NO: 2673075 - RNA, 19 nt, Homo sapiens
  misc_RNA (1)...(19): siRNA sense strand
aggugaagccucaagcauu

SEQ ID NO: 2673076 - RNA, 19 nt, Homo sapiens
  misc_RNA (1)...(19): siRNA sense strand
cgaacgugagcgaggcaga

SEQ ID NO: 2673077 - RNA, 19 nt, Homo sapiens
  misc_RNA (1)...(19): siRNA sense strand
ccucuacaacaaaggguuu

SEQ ID NO: 2673078 - RNA, 19 nt, Homo sapiens
  misc_RNA (1)...(19): siRNA sense strand
caaggaugggaaugagaga

SEQ ID NO: 2673079 - RNA, 19 nt, Homo sapiens
  misc_RNA (1)...(19): siRNA sense strand
guggagagccagaaggaug

SEQ ID NO: 2673080 - RNA, 19 nt, Homo sapiens
  misc_RNA (1)...(19): siRNA sense strand
cggacaugcagaagaccau

SEQ ID NO: 2673081 - RNA, 19 nt, Homo sapiens
  misc_RNA (1)...(19): siRNA sense strand
agaaggugcugguggugca

SEQ ID NO: 2673082 - RNA, 19 nt, Homo sapiens
  misc_RNA (1)...(19): siRNA sense strand
ggcagagguuuccgggaca

SEQ ID NO: 2673083 - RNA, 19 nt, Homo sapiens
  misc_RNA (1)...(19): siRNA sense strand
gaugggaaugagagagcca

SEQ ID NO: 2673084 - RNA, 19 nt, Homo sapiens
  misc_RNA (1)...(19): siRNA sense strand
gcugcgugaacgagggcua

SEQ ID NO: 2673085 - RNA, 19 nt, Homo sapiens
  misc_RNA (1)...(19): siRNA sense strand
gcugcgugaacgagggcua

SEQ ID NO: 2673086 - RNA, 19 nt, Homo sapiens
  misc_RNA (1)...(19): siRNA sense strand
aaaugauggagacgcguaa

SEQ ID NO: 2673087 - RNA, 19 nt, Homo sapiens
  misc_RNA (1)...(19): siRNA sense strand
caucaguauugcaggucaa

SEQ ID NO: 2673088 - RNA, 19 nt, Homo sapiens
  misc_RNA (1)...(19): siRNA sense strand
cagcagaaccugauggagu

SEQ ID NO: 2673089 - RNA, 19 nt, Homo sapiens
  misc_RNA (1)...(19): siRNA sense strand
ucaccaaugcucagggaca

SEQ ID NO: 2673090 - RNA, 19 nt, Homo sapiens
  misc_RNA (1)...(19): siRNA sense strand
gguacaagcugccgcacca

SEQ ID NO: 2673091 - RNA, 19 nt, Homo sapiens
  misc_RNA (1)...(19): siRNA sense strand
uggacaauuccuacagcaa

SEQ ID NO: 2673092 - RNA, 19 nt, Homo sapiens
  misc_RNA (1)...(19): siRNA sense strand
gcauuuagcccaggaauca

SEQ ID NO: 2673093 - RNA, 19 nt, Homo sapiens
  misc_RNA (1)...(19): siRNA sense strand
agucauuaccagcgccauu

SEQ ID NO: 2673094 - RNA, 19 nt, Homo sapiens
  misc_RNA (1)...(19): siRNA sense strand
cgccagacgcucaagaaca

SEQ ID NO: 2673095 - RNA, 19 nt, Homo sapiens
  misc_RNA (1)...(19): siRNA sense strand
agaagagauccgggaguuu

SEQ ID NO: 2673096 - RNA, 19 nt, Homo sapiens
  misc_RNA (1)...(19): siRNA sense strand
augccuauuuugagaagaa

SEQ ID NO: 2673097 - RNA, 19 nt, Homo sapiens
  misc_RNA (1)...(19): siRNA sense strand
gcucaaagcugccugccua

SEQ ID NO: 2673098 - RNA, 19 nt, Homo sapiens
  misc_RNA (1)...(19): siRNA sense strand
ggugaaggaagaaggguca

SEQ ID NO: 2673099 - RNA, 19 nt, Homo sapiens
  misc_RNA (1)...(19): siRNA sense strand
gcaccagcucagaggagau

SEQ ID NO: 2673100 - RNA, 19 nt, Homo sapiens
  misc_RNA (1)...(19): siRNA sense strand
agccaugcuucgugugcaa

SEQ ID NO: 2673101 - RNA, 19 nt, Homo sapiens
  misc_RNA (1)...(19): siRNA sense strand
cggaacaagaagaagaaag

SEQ ID NO: 2673102 - RNA, 19 nt, Homo sapiens
  misc_RNA (1)...(19): siRNA sense strand
ggacaaguucagugagcug

SEQ ID NO: 2673103 - RNA, 19 nt, Homo sapiens
  misc_RNA (1)...(19): siRNA sense strand
ccaccaauaaggagcgacu

SEQ ID NO: 2673104 - RNA, 19 nt, Homo sapiens
  misc_RNA (1)...(19): siRNA sense strand
cccaaggaugcuaaugaaa

SEQ ID NO: 2673105 - RNA, 19 nt, Homo sapiens
  misc_RNA (1)...(19): siRNA sense strand
guggagacacagagcacca

SEQ ID NO: 2673106 - RNA, 19 nt, Homo sapiens
  misc_RNA (1)...(19): siRNA sense strand
gugaaggcugcaagggcuu

SEQ ID NO: 2673107 - RNA, 19 nt, Homo sapiens
  misc_RNA (1)...(19): siRNA sense strand
gugcgaaaugaccggaaca

SEQ ID NO: 2673108 - RNA, 19 nt, Homo sapiens
  misc_RNA (1)...(19): siRNA sense strand
gcaaaugaacuaagagaua

SEQ ID NO: 2673109 - RNA, 19 nt, Homo sapiens
  misc_RNA (1)...(19): siRNA sense strand
ccuccuaacuucagguaaa

SEQ ID NO: 2673110 - RNA, 19 nt, Homo sapiens
  misc_RNA (1)...(19): siRNA sense strand
ccagaaacuuggaugcaaa

SEQ ID NO: 2673111 - RNA, 19 nt, Homo sapiens
  misc_RNA (1)...(19): siRNA sense strand
gaaugagaaucaagagaau

SEQ ID NO: 2673112 - RNA, 19 nt, Homo sapiens
  misc_RNA (1)...(19): siRNA sense strand
caagaauggugaucagaua

SEQ ID NO: 2673113 - RNA, 19 nt, Homo sapiens
  misc_RNA (1)...(19): siRNA sense strand
caucaaaugucuuccaaua

SEQ ID NO: 2673114 - RNA, 19 nt, Homo sapiens
  misc_RNA (1)...(19): siRNA sense strand
gacgauaagcauugggaaa

SEQ ID NO: 2673115 - RNA, 19 nt, Homo sapiens
  misc_RNA (1)...(19): siRNA sense strand
cugaagaaguugauaguca

SEQ ID NO: 2673116 - RNA, 19 nt, Homo sapiens
  misc_RNA (1)...(19): siRNA sense strand
ggaugaagaaagugauauu

SEQ ID NO: 2673117 - RNA, 19 nt, Homo sapiens
  misc_RNA (1)...(19): siRNA sense strand
cgaaaagcguugacgauaa

SEQ ID NO: 2673118 - RNA, 19 nt, Homo sapiens
  misc_RNA (1)...(19): siRNA sense strand
gcgaagaggacgaggaaac

SEQ ID NO: 2673119 - RNA, 19 nt, Homo sapiens
  misc_RNA (1)...(19): siRNA sense strand
guccuaaaguggagaguuu

SEQ ID NO: 2673120 - RNA, 19 nt, Homo sapiens
  misc_RNA (1)...(19): siRNA sense strand
guucauaaugccaguguaa

SEQ ID NO: 2673121 - RNA, 19 nt, Homo sapiens
  misc_RNA (1)...(19): siRNA sense strand
ugagaagauuggagaugaa

SEQ ID NO: 2673122 - RNA, 19 nt, Homo sapiens
  misc_RNA (1)...(19): siRNA sense strand
aagauuuacugaagcgaaa

SEQ ID NO: 2673123 - RNA, 19 nt, Homo sapiens
  misc_RNA (1)...(19): siRNA sense strand
cugaagaguuugacacauu

SEQ ID NO: 2673124 - RNA, 19 nt, Homo sapiens
  misc_RNA (1)...(19): siRNA sense strand
cuaaaggauuucagacaau

SEQ ID NO: 2673125 - RNA, 19 nt, Homo sapiens
  misc_RNA (1)...(19): siRNA sense strand
caaguuauuucaaggcaaa

SEQ ID NO: 2673126 - RNA, 19 nt, Homo sapiens
  misc_RNA (1)...(19): siRNA sense strand
gugaacaagauguacgaaa

SEQ ID NO: 2673127 - RNA, 19 nt, Homo sapiens
  misc_RNA (1)...(19): siRNA sense strand
cuuaguaaauccagaucaa

SEQ ID NO: 2673128 - RNA, 19 nt, Homo sapiens
  misc_RNA (1)...(19): siRNA sense strand
gguacaaugcaaagcuuaa

SEQ ID NO: 2673129 - RNA, 19 nt, Homo sapiens
  misc_RNA (1)...(19): siRNA sense strand
gauucagaaauguggauua

SEQ ID NO: 2673130 - RNA, 19 nt, Homo sapiens
  misc_RNA (1)...(19): siRNA sense strand
ggauuuuggucaagauuaa

SEQ ID NO: 2673131 - RNA, 19 nt, Homo sapiens
  misc_RNA (1)...(19): siRNA sense strand
ugaaguugccagaggaaau

SEQ ID NO: 2673132 - RNA, 19 nt, Homo sapiens
  misc_RNA (1)...(19): siRNA sense strand
cugaagaugugcugucuaa

SEQ ID NO: 2673133 - RNA, 19 nt, Homo sapiens
  misc_RNA (1)...(19): siRNA sense strand
uauuacaacuagugagaga

SEQ ID NO: 2673134 - RNA, 19 nt, Homo sapiens
  misc_RNA (1)...(19): siRNA sense strand
aggaaaagaaugagaauca

SEQ ID NO: 2673135 - RNA, 19 nt, Homo sapiens
  misc_RNA (1)...(19): siRNA sense strand
gaugaagaaagcagaggaa

SEQ ID NO: 2673136 - RNA, 19 nt, Homo sapiens
  misc_RNA (1)...(19): siRNA sense strand
caguuuaaccugucauaua

SEQ ID NO: 2673137 - RNA, 19 nt, Homo sapiens
  misc_RNA (1)...(19): siRNA sense strand
agauaagacuguuaagcuu

SEQ ID NO: 2673138 - RNA, 19 nt, Homo sapiens
  misc_RNA (1)...(19): siRNA sense strand
acacaaaagcagaaagaga

SEQ ID NO: 2673139 - RNA, 19 nt, Homo sapiens
  misc_RNA (1)...(19): siRNA sense strand
ugaacaagauguacgaaaa

SEQ ID NO: 2673140 - RNA, 19 nt, Homo sapiens
  misc_RNA (1)...(19): siRNA sense strand
agccagaaaugcuguauaa

SEQ ID NO: 2673141 - RNA, 19 nt, Homo sapiens
  misc_RNA (1)...(19): siRNA sense strand
gauugauauuuguggugaa

SEQ ID NO: 2673142 - RNA, 19 nt, Homo sapiens
  misc_RNA (1)...(19): siRNA sense strand
ccaaguuauuucaaggcaa

SEQ ID NO: 2673143 - RNA, 19 nt, Homo sapiens
  misc_RNA (1)...(19): siRNA sense strand
gcuggaagccuguuacaaa

SEQ ID NO: 2673144 - RNA, 19 nt, Homo sapiens
  misc_RNA (1)...(19): siRNA sense strand
ccaaauuugcaaagacauu

SEQ ID NO: 2673145 - RNA, 19 nt, Homo sapiens
  misc_RNA (1)...(19): siRNA sense strand
cacaauaaacugaaagaga

SEQ ID NO: 2673146 - RNA, 19 nt, Homo sapiens
  misc_RNA (1)...(19): siRNA sense strand
ggauagugaaggaagugaa

SEQ ID NO: 2673147 - RNA, 19 nt, Homo sapiens
  misc_RNA (1)...(19): siRNA sense strand
uaaggauguugcugaaaua

SEQ ID NO: 2673148 - RNA, 19 nt, Homo sapiens
  misc_RNA (1)...(19): siRNA sense strand
gagcgugugaucagaauaa

SEQ ID NO: 2673149 - RNA, 19 nt, Homo sapiens
  misc_RNA (1)...(19): siRNA sense strand
gaugaaaagugcuguggaa

SEQ ID NO: 2673150 - RNA, 19 nt, Homo sapiens
  misc_RNA (1)...(19): siRNA sense strand
gaaggaaaacagauagaaa

SEQ ID NO: 2673151 - RNA, 19 nt, Homo sapiens
  misc_RNA (1)...(19): siRNA sense strand
aacuuaugauugugggaaa

SEQ ID NO: 2673152 - RNA, 19 nt, Homo sapiens
  misc_RNA (1)...(19): siRNA sense strand
agacaaucauccagagagu

SEQ ID NO: 2673153 - RNA, 19 nt, Homo sapiens
  misc_RNA (1)...(19): siRNA sense strand
gagaaaagaauuagcugaa

SEQ ID NO: 2673154 - RNA, 19 nt, Homo sapiens
  misc_RNA (1)...(19): siRNA sense strand
uaguggaucucgugaacaa

SEQ ID NO: 2673155 - RNA, 19 nt, Homo sapiens
  misc_RNA (1)...(19): siRNA sense strand
ggaagaaggaacagccuca

SEQ ID NO: 2673156 - RNA, 19 nt, Homo sapiens
  misc_RNA (1)...(19): siRNA sense strand
ugaaggaagugaaggcuca

SEQ ID NO: 2673157 - RNA, 19 nt, Homo sapiens
  misc_RNA (1)...(19): siRNA sense strand
cagcaaaugaacuaagaga

SEQ ID NO: 2673158 - RNA, 19 nt, Homo sapiens
  misc_RNA (1)...(19): siRNA sense strand
cuuaaauacugaaggauac

SEQ ID NO: 2673159 - RNA, 19 nt, Homo sapiens
  misc_RNA (1)...(19): siRNA sense strand
ucauaacaguggugguaga

SEQ ID NO: 2673160 - RNA, 19 nt, Homo sapiens
  misc_RNA (1)...(19): siRNA sense strand
uugcugaaauacagacuaa

SEQ ID NO: 2673161 - RNA, 19 nt, Homo sapiens
  misc_RNA (1)...(19): siRNA sense strand
acuaaaggauuucagacaa

SEQ ID NO: 2673162 - RNA, 19 nt, Homo sapiens
  misc_RNA (1)...(19): siRNA sense strand
gugaugaccuggauaguga

SEQ ID NO: 2673163 - RNA, 19 nt, Homo sapiens
  misc_RNA (1)...(19): siRNA sense strand
ggacuugcacaguaauaaa

SEQ ID NO: 2673164 - RNA, 19 nt, Homo sapiens
  misc_RNA (1)...(19): siRNA sense strand
ggcugaaaguggcuguaaa

SEQ ID NO: 2673165 - RNA, 19 nt, Homo sapiens
  misc_RNA (1)...(19): siRNA sense strand
gaaagagagcagucccaaa

SEQ ID NO: 2673166 - RNA, 19 nt, Homo sapiens
  misc_RNA (1)...(19): siRNA sense strand
uuacaacuagugagagaaa

SEQ ID NO: 2673167 - RNA, 19 nt, Homo sapiens
  misc_RNA (1)...(19): siRNA sense strand
aggauacacuucugaggaa

SEQ ID NO: 2673168 - RNA, 19 nt, Homo sapiens
  misc_RNA (1)...(19): siRNA sense strand
gcugauggcaaguuagcaa

SEQ ID NO: 2673169 - RNA, 19 nt, Homo sapiens
  misc_RNA (1)...(19): siRNA sense strand
gcauuaacguggcauagaa

SEQ ID NO: 2673170 - RNA, 19 nt, Homo sapiens
  misc_RNA (1)...(19): siRNA sense strand
ccucaggcagcgauggaaa

SEQ ID NO: 2673171 - RNA, 19 nt, Homo sapiens
  misc_RNA (1)...(19): siRNA sense strand
acaauguccaggaaggaaa

SEQ ID NO: 2673172 - RNA, 19 nt, Homo sapiens
  misc_RNA (1)...(19): siRNA sense strand
aguguaaacuugucaguga

SEQ ID NO: 2673173 - RNA, 19 nt, Homo sapiens
  misc_RNA (1)...(19): siRNA sense strand
ggacaguguguuugcucaa

SEQ ID NO: 2673174 - RNA, 19 nt, Homo sapiens
  misc_RNA (1)...(19): siRNA sense strand
cugaaggaacugaagauuu

SEQ ID NO: 2673175 - RNA, 19 nt, Homo sapiens
  misc_RNA (1)...(19): siRNA sense strand
cuugaugacuugaugaaga

SEQ ID NO: 2673176 - RNA, 19 nt, Homo sapiens
  misc_RNA (1)...(19): siRNA sense strand
cagggaggauacagaauuu

SEQ ID NO: 2673177 - RNA, 19 nt, Homo sapiens
  misc_RNA (1)...(19): siRNA sense strand
ccagauaagacuucuaauu

SEQ ID NO: 2673178 - RNA, 19 nt, Homo sapiens
  misc_RNA (1)...(19): siRNA sense strand
uucaauuaguguaggagaa

SEQ ID NO: 2673179 - RNA, 19 nt, Homo sapiens
  misc_RNA (1)...(19): siRNA sense strand
uuacaugcuuucagggaga

SEQ ID NO: 2673180 - RNA, 19 nt, Homo sapiens
  misc_RNA (1)...(19): siRNA sense strand
aagaaguggcugugaagau

SEQ ID NO: 2673181 - RNA, 19 nt, Homo sapiens
  misc_RNA (1)...(19): siRNA sense strand
acaaaagcagaaagagaua

SEQ ID NO: 2673182 - RNA, 19 nt, Homo sapiens
  misc_RNA (1)...(19): siRNA sense strand
gcauauacauucuccugaa

SEQ ID NO: 2673183 - RNA, 19 nt, Homo sapiens
  misc_RNA (1)...(19): siRNA sense strand
aagaauguguucauaggaa

SEQ ID NO: 2673184 - RNA, 19 nt, Homo sapiens
  misc_RNA (1)...(19): siRNA sense strand
gcaucauucauuugacuua

SEQ ID NO: 2673185 - RNA, 19 nt, Homo sapiens
  misc_RNA (1)...(19): siRNA sense strand
agcaagauccagagagaaa

SEQ ID NO: 2673186 - RNA, 19 nt, Homo sapiens
  misc_RNA (1)...(19): siRNA sense strand
gggauaucguguuggaaaa

SEQ ID NO: 2673187 - RNA, 19 nt, Homo sapiens
  misc_RNA (1)...(19): siRNA sense strand
ggaaaauguauacggauaa

SEQ ID NO: 2673188 - RNA, 19 nt, Homo sapiens
  misc_RNA (1)...(19): siRNA sense strand
ccucaaagaaauugugcau

SEQ ID NO: 2673189 - RNA, 19 nt, Homo sapiens
  misc_RNA (1)...(19): siRNA sense strand
uagcauucuuuaagggcaa

SEQ ID NO: 2673190 - RNA, 19 nt, Homo sapiens
  misc_RNA (1)...(19): siRNA sense strand
aggaaauacuauggagaga

SEQ ID NO: 2673191 - RNA, 19 nt, Homo sapiens
  misc_RNA (1)...(19): siRNA sense strand
caguuuauugguugggaaa

SEQ ID NO: 2673192 - RNA, 19 nt, Homo sapiens
  misc_RNA (1)...(19): siRNA sense strand
caauaaucaugggaggaaa

SEQ ID NO: 2673193 - RNA, 19 nt, Homo sapiens
  misc_RNA (1)...(19): siRNA sense strand
augggauacuguugaguua

SEQ ID NO: 2673194 - RNA, 19 nt, Homo sapiens
  misc_RNA (1)...(19): siRNA sense strand
ucaucaagccagagcaaga

SEQ ID NO: 2673195 - RNA, 19 nt, Homo sapiens
  misc_RNA (1)...(19): siRNA sense strand
acagaaaugaagaguguga

SEQ ID NO: 2673196 - RNA, 19 nt, Homo sapiens
  misc_RNA (1)...(19): siRNA sense strand
gauaacaauuuacggccaa

SEQ ID NO: 2673197 - RNA, 19 nt, Homo sapiens
  misc_RNA (1)...(19): siRNA sense strand
agggcaaauuuguaggcua

SEQ ID NO: 2673198 - RNA, 19 nt, Homo sapiens
  misc_RNA (1)...(19): siRNA sense strand
aaaacaaaagcaagggaaa

SEQ ID NO: 2673199 - RNA, 19 nt, Homo sapiens
  misc_RNA (1)...(19): siRNA sense strand
gggaaaauacagaaaugaa

SEQ ID NO: 2673200 - RNA, 19 nt, Homo sapiens
  misc_RNA (1)...(19): siRNA sense strand
cguagugauaaaugagauu

SEQ ID NO: 2673201 - RNA, 19 nt, Homo sapiens
  misc_RNA (1)...(19): siRNA sense strand
cagagaaagcccaagacau

SEQ ID NO: 2673202 - RNA, 19 nt, Homo sapiens
  misc_RNA (1)...(19): siRNA sense strand
caugcaaggaauagcaauu

SEQ ID NO: 2673203 - RNA, 19 nt, Homo sapiens
  misc_RNA (1)...(19): siRNA sense strand
gggugauagcugagcggau

SEQ ID NO: 2673204 - RNA, 19 nt, Homo sapiens
  misc_RNA (1)...(19): siRNA sense strand
caucaaauugccucugaaa

SEQ ID NO: 2673205 - RNA, 19 nt, Homo sapiens
  misc_RNA (1)...(19): siRNA sense strand
gggcgauuucacagaguuu

SEQ ID NO: 2673206 - RNA, 19 nt, Homo sapiens
  misc_RNA (1)...(19): siRNA sense strand
ggggauaucguguuggaaa

SEQ ID NO: 2673207 - RNA, 19 nt, Homo sapiens
  misc_RNA (1)...(19): siRNA sense strand
gcggaugauagaagcagua

SEQ ID NO: 2673208 - RNA, 19 nt, Homo sapiens
  misc_RNA (1)...(19): siRNA sense strand
guuagaagcaacaagauca

SEQ ID NO: 2673209 - RNA, 19 nt, Homo sapiens
  misc_RNA (1)...(19): siRNA sense strand
caucaucaagccagagcaa

SEQ ID NO: 2673210 - RNA, 19 nt, Homo sapiens
  misc_RNA (1)...(19): siRNA sense strand
uggaggaggaggaggacga

SEQ ID NO: 2673211 - RNA, 19 nt, Homo sapiens
  misc_RNA (1)...(19): siRNA sense strand
acaaagagcaagauccaga

SEQ ID NO: 2673212 - RNA, 19 nt, Homo sapiens
  misc_RNA (1)...(19): siRNA sense strand
gaugaaagcagaaaagaga

SEQ ID NO: 2673213 - RNA, 19 nt, Homo sapiens
  misc_RNA (1)...(19): siRNA sense strand
cuugaguaugaaugggaua

SEQ ID NO: 2673214 - RNA, 19 nt, Homo sapiens
  misc_RNA (1)...(19): siRNA sense strand
ucaucuacucugugaaauu

SEQ ID NO: 2673215 - RNA, 19 nt, Homo sapiens
  misc_RNA (1)...(19): siRNA sense strand
cccaagaacauuaauggaa

SEQ ID NO: 2673216 - RNA, 19 nt, Homo sapiens
  misc_RNA (1)...(19): siRNA sense strand
gcccaucaugcaaggaaua

SEQ ID NO: 2673217 - RNA, 19 nt, Homo sapiens
  misc_RNA (1)...(19): siRNA sense strand
cgucaucuacucugugaaa

SEQ ID NO: 2673218 - RNA, 19 nt, Homo sapiens
  misc_RNA (1)...(19): siRNA sense strand
ggaaaaccuuggacagaca

SEQ ID NO: 2673219 - RNA, 19 nt, Homo sapiens
  misc_RNA (1)...(19): siRNA sense strand
aguuacagcaggaagaaca

SEQ ID NO: 2673220 - RNA, 19 nt, Homo sapiens
  misc_RNA (1)...(19): siRNA sense strand
ccaguuuauugguugggaa

SEQ ID NO: 2673221 - RNA, 19 nt, Homo sapiens
  misc_RNA (1)...(19): siRNA sense strand
acaacucagcugacaauaa

SEQ ID NO: 2673222 - RNA, 19 nt, Homo sapiens
  misc_RNA (1)...(19): siRNA sense strand
aaugauggccagcgaagaa

SEQ ID NO: 2673223 - RNA, 19 nt, Homo sapiens
  misc_RNA (1)...(19): siRNA sense strand
ggaucaacagacuuguaaa

SEQ ID NO: 2673224 - RNA, 19 nt, Homo sapiens
  misc_RNA (1)...(19): siRNA sense strand
ggcucauccucgaagcaua

SEQ ID NO: 2673225 - RNA, 19 nt, Homo sapiens
  misc_RNA (1)...(19): siRNA sense strand
aaauggaggaggaggagga

SEQ ID NO: 2673226 - RNA, 19 nt, Homo sapiens
  misc_RNA (1)...(19): siRNA sense strand
aagaguggacgcauggaaa

SEQ ID NO: 2673227 - RNA, 19 nt, Homo sapiens
  misc_RNA (1)...(19): siRNA sense strand
ccaagaacauuaauggaac

SEQ ID NO: 2673228 - RNA, 19 nt, Homo sapiens
  misc_RNA (1)...(19): siRNA sense strand
acaauaaucaugggaggaa

SEQ ID NO: 2673229 - RNA, 19 nt, Homo sapiens
  misc_RNA (1)...(19): siRNA sense strand
cuggaauaacauacaagaa

SEQ ID NO: 2673230 - RNA, 19 nt, Homo sapiens
  misc_RNA (1)...(19): siRNA sense strand
ccucagugugauaggcuuu

SEQ ID NO: 2673231 - RNA, 19 nt, Homo sapiens
  misc_RNA (1)...(19): siRNA sense strand
cugcaaaacuucccaagaa

SEQ ID NO: 2673232 - RNA, 19 nt, Homo sapiens
  misc_RNA (1)...(19): siRNA sense strand
cugaacaccauauaugaaa

SEQ ID NO: 2673233 - RNA, 19 nt, Homo sapiens
  misc_RNA (1)...(19): siRNA sense strand
ggaaauaagaguggacgca

SEQ ID NO: 2673234 - RNA, 19 nt, Homo sapiens
  misc_RNA (1)...(19): siRNA sense strand
auguacguaugcugagaua

SEQ ID NO: 2673235 - RNA, 19 nt, Homo sapiens
  misc_RNA (1)...(19): siRNA sense strand
aagaugagcaggaauguuu

SEQ ID NO: 2673236 - RNA, 19 nt, Homo sapiens
  misc_RNA (1)...(19): siRNA sense strand
aauaaucaugggaggaaaa

SEQ ID NO: 2673237 - RNA, 19 nt, Homo sapiens
  misc_RNA (1)...(19): siRNA sense strand
ccauggaaggguacaucaa

SEQ ID NO: 2673238 - RNA, 19 nt, Homo sapiens
  misc_RNA (1)...(19): siRNA sense strand
aggaaaagcaaucuggaau

SEQ ID NO: 2673239 - RNA, 19 nt, Homo sapiens
  misc_RNA (1)...(19): siRNA sense strand
ccagcgaagaauugacuuu

SEQ ID NO: 2673240 - RNA, 19 nt, Homo sapiens
  misc_RNA (1)...(19): siRNA sense strand
cugagauaaugcacaucaa

SEQ ID NO: 2673241 - RNA, 19 nt, Homo sapiens
  misc_RNA (1)...(19): siRNA sense strand
ccucgaagcauauacaaaa

SEQ ID NO: 2673242 - RNA, 19 nt, Homo sapiens
  misc_RNA (1)...(19): siRNA sense strand
ugggaucacuggaaaguca

SEQ ID NO: 2673243 - RNA, 19 nt, Homo sapiens
  misc_RNA (1)...(19): siRNA sense strand
gccacaagcuauagagcaa

SEQ ID NO: 2673244 - RNA, 19 nt, Homo sapiens
  misc_RNA (1)...(19): siRNA sense strand
gaggauacugauagggaaa

SEQ ID NO: 2673245 - RNA, 19 nt, Homo sapiens
  misc_RNA (1)...(19): siRNA sense strand
gcauggaaauuuugggaaa

SEQ ID NO: 2673246 - RNA, 19 nt, Homo sapiens
  misc_RNA (1)...(19): siRNA sense strand
ggaauuaccaugagcggaa

SEQ ID NO: 2673247 - RNA, 19 nt, Homo sapiens
  misc_RNA (1)...(19): siRNA sense strand
gcagauuguuaaagagaca

SEQ ID NO: 2673248 - RNA, 19 nt, Homo sapiens
  misc_RNA (1)...(19): siRNA sense strand
ccaacaaagcguagugauu

SEQ ID NO: 2673249 - RNA, 19 nt, Homo sapiens
  misc_RNA (1)...(19): siRNA sense strand
gggaaacagucgcaggaau

SEQ ID NO: 2673250 - RNA, 19 nt, Homo sapiens
  misc_RNA (1)...(19): siRNA sense strand
ggguaggguuucagaacau

SEQ ID NO: 2673251 - RNA, 19 nt, Homo sapiens
  misc_RNA (1)...(19): siRNA sense strand
uggaaagagaagacugaua

SEQ ID NO: 2673252 - RNA, 19 nt, Homo sapiens
  misc_RNA (1)...(19): siRNA sense strand
gggagaaaguacagugacu

SEQ ID NO: 2673253 - RNA, 19 nt, Homo sapiens
  misc_RNA (1)...(19): siRNA sense strand
uugcaaagcagaagauaau

SEQ ID NO: 2673254 - RNA, 19 nt, Homo sapiens
  misc_RNA (1)...(19): siRNA sense strand
gagaagaauggaaagagaa

SEQ ID NO: 2673255 - RNA, 19 nt, Homo sapiens
  misc_RNA (1)...(19): siRNA sense strand
ggaguaaaacggagggcua

SEQ ID NO: 2673256 - RNA, 19 nt, Homo sapiens
  misc_RNA (1)...(19): siRNA sense strand
gugaucaacuagaaagaau

SEQ ID NO: 2673257 - RNA, 19 nt, Homo sapiens
  misc_RNA (1)...(19): siRNA sense strand
caggaauaguggaaauaga

SEQ ID NO: 2673258 - RNA, 19 nt, Homo sapiens
  misc_RNA (1)...(19): siRNA sense strand
ggagaauggauuugggagu

SEQ ID NO: 2673259 - RNA, 19 nt, Homo sapiens
  misc_RNA (1)...(19): siRNA sense strand
caacugugagucagggaaa

SEQ ID NO: 2673260 - RNA, 19 nt, Homo sapiens
  misc_RNA (1)...(19): siRNA sense strand
agaaauuguugaagaguuc

SEQ ID NO: 2673261 - RNA, 19 nt, Homo sapiens
  misc_RNA (1)...(19): siRNA sense strand
ccacaagccucaaggguag

SEQ ID NO: 2673262 - RNA, 19 nt, Homo sapiens
  misc_RNA (1)...(19): siRNA sense strand
cgguaaaacucauugaaca

SEQ ID NO: 2673263 - RNA, 19 nt, Homo sapiens
  misc_RNA (1)...(19): siRNA sense strand
aagagaagacugauagaga

SEQ ID NO: 2673264 - RNA, 19 nt, Homo sapiens
  misc_RNA (1)...(19): siRNA sense strand
gagcauagcugcgguaaaa

SEQ ID NO: 2673265 - RNA, 19 nt, Homo sapiens
  misc_RNA (1)...(19): siRNA sense strand
gcuacaggacaaaugguua

SEQ ID NO: 2673266 - RNA, 19 nt, Homo sapiens
  misc_RNA (1)...(19): siRNA sense strand
cgcaggaauuccaaauaaa

SEQ ID NO: 2673267 - RNA, 19 nt, Homo sapiens
  misc_RNA (1)...(19): siRNA sense strand
acaagaugaaccaggacaa

SEQ ID NO: 2673268 - RNA, 19 nt, Homo sapiens
  misc_RNA (1)...(19): siRNA sense strand
uugcagugauuuugagaaa

SEQ ID NO: 2673269 - RNA, 19 nt, Homo sapiens
  misc_RNA (1)...(19): siRNA sense strand
gaaucauaguacagggcca

SEQ ID NO: 2673270 - RNA, 19 nt, Homo sapiens
  misc_RNA (1)...(19): siRNA sense strand
cagaguaaggaacaagaaa

SEQ ID NO: 2673271 - RNA, 19 nt, Homo sapiens
  misc_RNA (1)...(19): siRNA sense strand
uaaauuagcucguggugga

SEQ ID NO: 2673272 - RNA, 19 nt, Homo sapiens
  misc_RNA (1)...(19): siRNA sense strand
gggaaaauucaaagugaga

SEQ ID NO: 2673273 - RNA, 19 nt, Homo sapiens
  misc_RNA (1)...(19): siRNA sense strand
gagaagacugauagagacu

SEQ ID NO: 2673274 - RNA, 19 nt, Homo sapiens
  misc_RNA (1)...(19): siRNA sense strand
ccucgaaagcugggcauua

SEQ ID NO: 2673275 - RNA, 19 nt, Homo sapiens
  misc_RNA (1)...(19): siRNA sense strand
gagaaaguacagugacuca

SEQ ID NO: 2673276 - RNA, 19 nt, Homo sapiens
  misc_RNA (1)...(19): siRNA sense strand
caacugaacauggaggaaa

SEQ ID NO: 2673277 - RNA, 19 nt, Homo sapiens
  misc_RNA (1)...(19): siRNA sense strand
caggauaagcacuguucaa

SEQ ID NO: 2673278 - RNA, 19 nt, Homo sapiens
  misc_RNA (1)...(19): siRNA sense strand
cuauacaugcucacggaaa

SEQ ID NO: 2673279 - RNA, 19 nt, Homo sapiens
  misc_RNA (1)...(19): siRNA sense strand
ugaagagaguggaggauuc

SEQ ID NO: 2673280 - RNA, 19 nt, Homo sapiens
  misc_RNA (1)...(19): siRNA sense strand
gcguagugauuguaagcca

SEQ ID NO: 2673281 - RNA, 19 nt, Homo sapiens
  misc_RNA (1)...(19): siRNA sense strand
ccgacuaacagcugccuua

SEQ ID NO: 2673282 - RNA, 19 nt, Homo sapiens
  misc_RNA (1)...(19): siRNA sense strand
cacuguauuuggagaagaa

SEQ ID NO: 2673283 - RNA, 19 nt, Homo sapiens
  misc_RNA (1)...(19): siRNA sense strand
ucagcaagauacugccaaa

SEQ ID NO: 2673284 - RNA, 19 nt, Homo sapiens
  misc_RNA (1)...(19): siRNA sense strand
gagaaaaccuggacagaac

SEQ ID NO: 2673285 - RNA, 19 nt, Homo sapiens
  misc_RNA (1)...(19): siRNA sense strand
ggggagaaauuguugaaga

SEQ ID NO: 2673286 - RNA, 19 nt, Homo sapiens
  misc_RNA (1)...(19): siRNA sense strand
gggagaaauuguugaagag

SEQ ID NO: 2673287 - RNA, 19 nt, Homo sapiens
  misc_RNA (1)...(19): siRNA sense strand
gugaauauguggaucagga

SEQ ID NO: 2673288 - RNA, 19 nt, Homo sapiens
  misc_RNA (1)...(19): siRNA sense strand
guuguuaaggcuacaguua

SEQ ID NO: 2673289 - RNA, 19 nt, Homo sapiens
  misc_RNA (1)...(19): siRNA sense strand
gcagacaggaguuggacuu

SEQ ID NO: 2673290 - RNA, 19 nt, Homo sapiens
  misc_RNA (1)...(19): siRNA sense strand
cuguacaagugcagggcca

SEQ ID NO: 2673291 - RNA, 19 nt, Homo sapiens
  misc_RNA (1)...(19): siRNA sense strand
uuugcaaagcagaagauaa

SEQ ID NO: 2673292 - RNA, 19 nt, Homo sapiens
  misc_RNA (1)...(19): siRNA sense strand
ggacagaucccuucaggca

SEQ ID NO: 2673293 - RNA, 19 nt, Homo sapiens
  misc_RNA (1)...(19): siRNA sense strand
caucauuggaauuagguga

SEQ ID NO: 2673294 - RNA, 19 nt, Homo sapiens
  misc_RNA (1)...(19): siRNA sense strand
ugaagguacaucaggagaa

SEQ ID NO: 2673295 - RNA, 19 nt, Homo sapiens
  misc_RNA (1)...(19): siRNA sense strand
aagaugagaggcauggaaa

SEQ ID NO: 2673296 - RNA, 19 nt, Homo sapiens
  misc_RNA (1)...(19): siRNA sense strand
gagaaaaccgcuaguuaau

SEQ ID NO: 2673297 - RNA, 19 nt, Homo sapiens
  misc_RNA (1)...(19): siRNA sense strand
ccuagaaaaguacgagaaa

SEQ ID NO: 2673298 - RNA, 19 nt, Homo sapiens
  misc_RNA (1)...(19): siRNA sense strand
cguugaugauaaugaaguu

SEQ ID NO: 2673299 - RNA, 19 nt, Homo sapiens
  misc_RNA (1)...(19): siRNA sense strand
agaugagaggcauggaaau

SEQ ID NO: 2673300 - RNA, 19 nt, Homo sapiens
  misc_RNA (1)...(19): siRNA sense strand
agagcauagcugcgguaaa

SEQ ID NO: 2673301 - RNA, 19 nt, Homo sapiens
  misc_RNA (1)...(19): siRNA sense strand
uaguauugcuguuggagga

SEQ ID NO: 2673302 - RNA, 19 nt, Homo sapiens
  misc_RNA (1)...(19): siRNA sense strand
ugauaaaggagaugguucu

SEQ ID NO: 2673303 - RNA, 19 nt, Homo sapiens
  misc_RNA (1)...(19): siRNA sense strand
uagaaaaguacgagaaagu

SEQ ID NO: 2673304 - RNA, 19 nt, Homo sapiens
  misc_RNA (1)...(19): siRNA sense strand
cauuaacgauauugaagga

SEQ ID NO: 2673305 - RNA, 19 nt, Homo sapiens
  misc_RNA (1)...(19): siRNA sense strand
ccuugacacauuaggaaau

SEQ ID NO: 2673306 - RNA, 19 nt, Homo sapiens
  misc_RNA (1)...(19): siRNA sense strand
caacacucgaggugcuaua

SEQ ID NO: 2673307 - RNA, 19 nt, Homo sapiens
  misc_RNA (1)...(19): siRNA sense strand
guggaaauagauagugaga

SEQ ID NO: 2673308 - RNA, 19 nt, Homo sapiens
  misc_RNA (1)...(19): siRNA sense strand
ggaaauaggaagaggcagu

SEQ ID NO: 2673309 - RNA, 19 nt, Homo sapiens
  misc_RNA (1)...(19): siRNA sense strand
gggaagggaaagaaggaga

SEQ ID NO: 2673310 - RNA, 19 nt, Homo sapiens
  misc_RNA (1)...(19): siRNA sense strand
cgccagaggaagaugggaa

SEQ ID NO: 2673311 - RNA, 19 nt, Homo sapiens
  misc_RNA (1)...(19): siRNA sense strand
gggcucgagggaagggaaa

SEQ ID NO: 2673312 - RNA, 19 nt, Homo sapiens
  misc_RNA (1)...(19): siRNA sense strand
ggagcaagagaaaaggaaa

SEQ ID NO: 2673313 - RNA, 19 nt, Homo sapiens
  misc_RNA (1)...(19): siRNA sense strand
gggagauccuagaugucau

SEQ ID NO: 2673314 - RNA, 19 nt, Homo sapiens
  misc_RNA (1)...(19): siRNA sense strand
cugaacagugguagcgaca

SEQ ID NO: 2673315 - RNA, 19 nt, Homo sapiens
  misc_RNA (1)...(19): siRNA sense strand
cucaagggcucgagggaag

SEQ ID NO: 2673316 - RNA, 19 nt, Homo sapiens
  misc_RNA (1)...(19): siRNA sense strand
agggaaagaaggagaacag

SEQ ID NO: 2673317 - RNA, 19 nt, Homo sapiens
  misc_RNA (1)...(19): siRNA sense strand
ccuagaugucauaagccaa

SEQ ID NO: 2673318 - RNA, 19 nt, Homo sapiens
  misc_RNA (1)...(19): siRNA sense strand
gaacagaucugguuuccca

SEQ ID NO: 2673319 - RNA, 19 nt, Homo sapiens
  misc_RNA (1)...(19): siRNA sense strand
cuggaggguuggaaggcga

SEQ ID NO: 2673320 - RNA, 19 nt, Homo sapiens
  misc_RNA (1)...(19): siRNA sense strand
gcucgagggaagggaaaga

SEQ ID NO: 2673321 - RNA, 19 nt, Homo sapiens
  misc_RNA (1)...(19): siRNA sense strand
agccaaagcuacagggagc

SEQ ID NO: 2673322 - RNA, 19 nt, Homo sapiens
  misc_RNA (1)...(19): siRNA sense strand
cgccacgugcguagugaua

SEQ ID NO: 2673323 - RNA, 19 nt, Homo sapiens
  misc_RNA (1)...(19): siRNA sense strand
acccauaaagaaugagaaa

SEQ ID NO: 2673324 - RNA, 19 nt, Homo sapiens
  misc_RNA (1)...(19): siRNA sense strand
guaacuucgugcugggcaa

SEQ ID NO: 2673325 - RNA, 19 nt, Homo sapiens
  misc_RNA (1)...(19): siRNA sense strand
acaaggaguucaaggcuga

SEQ ID NO: 2673326 - RNA, 19 nt, Homo sapiens
  misc_RNA (1)...(19): siRNA sense strand
ccaaaggcuucaaugccaa

SEQ ID NO: 2673327 - RNA, 19 nt, Homo sapiens
  misc_RNA (1)...(19): siRNA sense strand
gaggcaaggaacacagaca

SEQ ID NO: 2673328 - RNA, 19 nt, Homo sapiens
  misc_RNA (1)...(19): siRNA sense strand
agggcaagcacaagcucaa

SEQ ID NO: 2673329 - RNA, 19 nt, Homo sapiens
  misc_RNA (1)...(19): siRNA sense strand
cgacagauggaaggagaca

SEQ ID NO: 2673330 - RNA, 19 nt, Homo sapiens
  misc_RNA (1)...(19): siRNA sense strand
ggcaaggaacacagacaca

SEQ ID NO: 2673331 - RNA, 19 nt, Homo sapiens
  misc_RNA (1)...(19): siRNA sense strand
aguucaaggcugagcugau

SEQ ID NO: 2673332 - RNA, 19 nt, Homo sapiens
  misc_RNA (1)...(19): siRNA sense strand
cccgacagauggaaggaga

SEQ ID NO: 2673333 - RNA, 19 nt, Homo sapiens
  misc_RNA (1)...(19): siRNA sense strand
aggccaaugccgacgugaa

SEQ ID NO: 2673334 - RNA, 19 nt, Homo sapiens
  misc_RNA (1)...(19): siRNA sense strand
ccaggguaguagauggcau

SEQ ID NO: 2673335 - RNA, 19 nt, Homo sapiens
  misc_RNA (1)...(19): siRNA sense strand
acgcggugguguuugggaa

SEQ ID NO: 2673336 - RNA, 19 nt, Homo sapiens
  misc_RNA (1)...(19): siRNA sense strand
cggccaucauccagcgcau

SEQ ID NO: 2673337 - RNA, 19 nt, Homo sapiens
  misc_RNA (1)...(19): siRNA sense strand
ugguaaaggccaaugccga

SEQ ID NO: 2673338 - RNA, 19 nt, Homo sapiens
  misc_RNA (1)...(19): siRNA sense strand
gggcacuggaagaggagaa

SEQ ID NO: 2673339 - RNA, 19 nt, Homo sapiens
  misc_RNA (1)...(19): siRNA sense strand
uggaagaggagaaggccua

SEQ ID NO: 2673340 - RNA, 19 nt, Homo sapiens
  misc_RNA (1)...(19): siRNA sense strand
ccaaaguggagcuggccaa

SEQ ID NO: 2673341 - RNA, 19 nt, Homo sapiens
  misc_RNA (1)...(19): siRNA sense strand
uaaacaggguggauggcaa

SEQ ID NO: 2673342 - RNA, 19 nt, Homo sapiens
  misc_RNA (1)...(19): siRNA sense strand
ucuccaagcugauggccaa

SEQ ID NO: 2673343 - RNA, 19 nt, Homo sapiens
  misc_RNA (1)...(19): siRNA sense strand
caagagaagaguuuggaca

SEQ ID NO: 2673344 - RNA, 19 nt, Homo sapiens
  misc_RNA (1)...(19): siRNA sense strand
agaaggugaugaagggcau

SEQ ID NO: 2673345 - RNA, 19 nt, Homo sapiens
  misc_RNA (1)...(19): siRNA sense strand
uggagcagcuagaagccaa

SEQ ID NO: 2673346 - RNA, 19 nt, Homo sapiens
  misc_RNA (1)...(19): siRNA sense strand
gugaaaagcaagcuccaaa

SEQ ID NO: 2673347 - RNA, 19 nt, Homo sapiens
  misc_RNA (1)...(19): siRNA sense strand
agucuuaccuacaggccuu

SEQ ID NO: 2673348 - RNA, 19 nt, Homo sapiens
  misc_RNA (1)...(19): siRNA sense strand
guucaugggugcuggggau

SEQ ID NO: 2673349 - RNA, 19 nt, Homo sapiens
  misc_RNA (1)...(19): siRNA sense strand
ccaucgaggagaaggugau

SEQ ID NO: 2673350 - RNA, 19 nt, Homo sapiens
  misc_RNA (1)...(19): siRNA sense strand
gagaaggugaugaagggca

SEQ ID NO: 2673351 - RNA, 19 nt, Homo sapiens
  misc_RNA (1)...(19): siRNA sense strand
ggacaguggcauugggacc

SEQ ID NO: 2673352 - RNA, 19 nt, Homo sapiens
  misc_RNA (1)...(19): siRNA sense strand
caaacagccugaagcagca

SEQ ID NO: 2673353 - RNA, 19 nt, Homo sapiens
  misc_RNA (1)...(19): siRNA sense strand
agaaagaccacaaggagaa

SEQ ID NO: 2673354 - RNA, 19 nt, Homo sapiens
  misc_RNA (1)...(19): siRNA sense strand
gggagaaagggaaggaaaa

SEQ ID NO: 2673355 - RNA, 19 nt, Homo sapiens
  misc_RNA (1)...(19): siRNA sense strand
gcaaaagugaacagaguaa

SEQ ID NO: 2673356 - RNA, 19 nt, Homo sapiens
  misc_RNA (1)...(19): siRNA sense strand
aggcauggcuccagaugaa

SEQ ID NO: 2673357 - RNA, 19 nt, Homo sapiens
  misc_RNA (1)...(19): siRNA sense strand
gcuaaagagacuucagaau

SEQ ID NO: 2673358 - RNA, 19 nt, Homo sapiens
  misc_RNA (1)...(19): siRNA sense strand
ccacugagucauuggacaa

SEQ ID NO: 2673359 - RNA, 19 nt, Homo sapiens
  misc_RNA (1)...(19): siRNA sense strand
gcugaaauagaaagugaaa

SEQ ID NO: 2673360 - RNA, 19 nt, Homo sapiens
  misc_RNA (1)...(19): siRNA sense strand
ccacacaggagaagggaga

SEQ ID NO: 2673361 - RNA, 19 nt, Homo sapiens
  misc_RNA (1)...(19): siRNA sense strand
agggagaaagggaaggaaa

SEQ ID NO: 2673362 - RNA, 19 nt, Homo sapiens
  misc_RNA (1)...(19): siRNA sense strand
ggagaagggagaaagggaa

SEQ ID NO: 2673363 - RNA, 19 nt, Homo sapiens
  misc_RNA (1)...(19): siRNA sense strand
acacaguucaguugggaua

SEQ ID NO: 2673364 - RNA, 19 nt, Homo sapiens
  misc_RNA (1)...(19): siRNA sense strand
cauccaaaauacugggaaa

SEQ ID NO: 2673365 - RNA, 19 nt, Homo sapiens
  misc_RNA (1)...(19): siRNA sense strand
agaugagacugaugaguau

SEQ ID NO: 2673366 - RNA, 19 nt, Homo sapiens
  misc_RNA (1)...(19): siRNA sense strand
cgaaggaagaggaguuauu

SEQ ID NO: 2673367 - RNA, 19 nt, Homo sapiens
  misc_RNA (1)...(19): siRNA sense strand
aggaagaagagauguggaa

SEQ ID NO: 2673368 - RNA, 19 nt, Homo sapiens
  misc_RNA (1)...(19): siRNA sense strand
gcaacaaauacaaagguuu

SEQ ID NO: 2673369 - RNA, 19 nt, Homo sapiens
  misc_RNA (1)...(19): siRNA sense strand
ugagaagauaagugagaau

SEQ ID NO: 2673370 - RNA, 19 nt, Homo sapiens
  misc_RNA (1)...(19): siRNA sense strand
aacaaaggcaggagcaaua

SEQ ID NO: 2673371 - RNA, 19 nt, Homo sapiens
  misc_RNA (1)...(19): siRNA sense strand
aggaagaggaguuauuaaa

SEQ ID NO: 2673372 - RNA, 19 nt, Homo sapiens
  misc_RNA (1)...(19): siRNA sense strand
aggaagaacaaguuggaga

SEQ ID NO: 2673373 - RNA, 19 nt, Homo sapiens
  misc_RNA (1)...(19): siRNA sense strand
cagaaagaccacaaggaga

SEQ ID NO: 2673374 - RNA, 19 nt, Homo sapiens
  misc_RNA (1)...(19): siRNA sense strand
aggcugagcaagaggaaaa

SEQ ID NO: 2673375 - RNA, 19 nt, Homo sapiens
  misc_RNA (1)...(19): siRNA sense strand
caacauaaugaaacgacua

SEQ ID NO: 2673376 - RNA, 19 nt, Homo sapiens
  misc_RNA (1)...(19): siRNA sense strand
ccuuaaucaucgaagaaaa

SEQ ID NO: 2673377 - RNA, 19 nt, Homo sapiens
  misc_RNA (1)...(19): siRNA sense strand
gauaugcagcugagugaaa

SEQ ID NO: 2673378 - RNA, 19 nt, Homo sapiens
  misc_RNA (1)...(19): siRNA sense strand
guuaaaagcuauugagaac

SEQ ID NO: 2673379 - RNA, 19 nt, Homo sapiens
  misc_RNA (1)...(19): siRNA sense strand
agaaaguccagauggcaaa

SEQ ID NO: 2673380 - RNA, 19 nt, Homo sapiens
  misc_RNA (1)...(19): siRNA sense strand
uggcugaaacugugacuaa

SEQ ID NO: 2673381 - RNA, 19 nt, Homo sapiens
  misc_RNA (1)...(19): siRNA sense strand
ggagggaaagcaagaacaa

SEQ ID NO: 2673382 - RNA, 19 nt, Homo sapiens
  misc_RNA (1)...(19): siRNA sense strand
ugaugauguuggagcaauu

SEQ ID NO: 2673383 - RNA, 19 nt, Homo sapiens
  misc_RNA (1)...(19): siRNA sense strand
gaguaucaaucauggaaaa

SEQ ID NO: 2673384 - RNA, 19 nt, Homo sapiens
  misc_RNA (1)...(19): siRNA sense strand
caaagagggcaaaggugaa

SEQ ID NO: 2673385 - RNA, 19 nt, Homo sapiens
  misc_RNA (1)...(19): siRNA sense strand
acacaggagaagggagaaa

SEQ ID NO: 2673386 - RNA, 19 nt, Homo sapiens
  misc_RNA (1)...(19): siRNA sense strand
agacaaugacccugaauca

SEQ ID NO: 2673387 - RNA, 19 nt, Homo sapiens
  misc_RNA (1)...(19): siRNA sense strand
aggugaaauuagaagccua

SEQ ID NO: 2673388 - RNA, 19 nt, Homo sapiens
  misc_RNA (1)...(19): siRNA sense strand
agaaggaagaguugaccaa

SEQ ID NO: 2673389 - RNA, 19 nt, Homo sapiens
  misc_RNA (1)...(19): siRNA sense strand
ucucaacaguacagaaaga

SEQ ID NO: 2673390 - RNA, 19 nt, Homo sapiens
  misc_RNA (1)...(19): siRNA sense strand
acaaagagggcaaagguga

SEQ ID NO: 2673391 - RNA, 19 nt, Homo sapiens
  misc_RNA (1)...(19): siRNA sense strand
aaacugaagagaaggaaga

SEQ ID NO: 2673392 - RNA, 19 nt, Homo sapiens
  misc_RNA (1)...(19): siRNA sense strand
uaggaaucauaaaggcaaa

SEQ ID NO: 2673393 - RNA, 19 nt, Homo sapiens
  misc_RNA (1)...(19): siRNA sense strand
gaugaaggagggaaagcaa

SEQ ID NO: 2673394 - RNA, 19 nt, Homo sapiens
  misc_RNA (1)...(19): siRNA sense strand
gaggaaaagcaaaagcaaa

SEQ ID NO: 2673395 - RNA, 19 nt, Homo sapiens
  misc_RNA (1)...(19): siRNA sense strand
ccagauacuucgagacacu

SEQ ID NO: 2673396 - RNA, 19 nt, Homo sapiens
  misc_RNA (1)...(19): siRNA sense strand
ugagacaagugaagcagaa

SEQ ID NO: 2673397 - RNA, 19 nt, Homo sapiens
  misc_RNA (1)...(19): siRNA sense strand
agaaagucucagaggccaa

SEQ ID NO: 2673398 - RNA, 19 nt, Homo sapiens
  misc_RNA (1)...(19): siRNA sense strand
uggcugaaauagaaaguga

SEQ ID NO: 2673399 - RNA, 19 nt, Homo sapiens
  misc_RNA (1)...(19): siRNA sense strand
gaccacaaggagaaggaaa

SEQ ID NO: 2673400 - RNA, 19 nt, Homo sapiens
  misc_RNA (1)...(19): siRNA sense strand
agugagaauugggaagaaa

SEQ ID NO: 2673401 - RNA, 19 nt, Homo sapiens
  misc_RNA (1)...(19): siRNA sense strand
cauuggacaaagagggcaa

SEQ ID NO: 2673402 - RNA, 19 nt, Homo sapiens
  misc_RNA (1)...(19): siRNA sense strand
aaagaggacaggaggaaga

SEQ ID NO: 2673403 - RNA, 19 nt, Homo sapiens
  misc_RNA (1)...(19): siRNA sense strand
acucagaacaucacagauu

SEQ ID NO: 2673404 - RNA, 19 nt, Homo sapiens
  misc_RNA (1)...(19): siRNA sense strand
accaagaaacccaaaguaa

SEQ ID NO: 2673405 - RNA, 19 nt, Homo sapiens
  misc_RNA (1)...(19): siRNA sense strand
cggauaaugacucgcuaua

SEQ ID NO: 2673406 - RNA, 19 nt, Homo sapiens
  misc_RNA (1)...(19): siRNA sense strand
aaacaaaggaucagaugca

SEQ ID NO: 2673407 - RNA, 19 nt, Homo sapiens
  misc_RNA (1)...(19): siRNA sense strand
uaucacaagcaaagaagaa

SEQ ID NO: 2673408 - RNA, 19 nt, Homo sapiens
  misc_RNA (1)...(19): siRNA sense strand
agggaaagcaagaacaaca

SEQ ID NO: 2673409 - RNA, 19 nt, Homo sapiens
  misc_RNA (1)...(19): siRNA sense strand
ccacagucauccagggcga

SEQ ID NO: 2673410 - RNA, 19 nt, Homo sapiens
  misc_RNA (1)...(19): siRNA sense strand
caaagcaggcugagcaaga

SEQ ID NO: 2673411 - RNA, 19 nt, Homo sapiens
  misc_RNA (1)...(19): siRNA sense strand
ccagagaggacauugauau

SEQ ID NO: 2673412 - RNA, 19 nt, Homo sapiens
  misc_RNA (1)...(19): siRNA sense strand
gcugaaagaacuccagauu

SEQ ID NO: 2673413 - RNA, 19 nt, Homo sapiens
  misc_RNA (1)...(19): siRNA sense strand
gaagagauguggaaggaag

SEQ ID NO: 2673414 - RNA, 19 nt, Homo sapiens
  misc_RNA (1)...(19): siRNA sense strand
cagaugcagaugaaggaaa

SEQ ID NO: 2673415 - RNA, 19 nt, Homo sapiens
  misc_RNA (1)...(19): siRNA sense strand
ccgaagaaacccagauacu

SEQ ID NO: 2673416 - RNA, 19 nt, Homo sapiens
  misc_RNA (1)...(19): siRNA sense strand
agaaacaguggcaggaaga

SEQ ID NO: 2673417 - RNA, 19 nt, Homo sapiens
  misc_RNA (1)...(19): siRNA sense strand
gauucagaaggaagcgaaa

SEQ ID NO: 2673418 - RNA, 19 nt, Homo sapiens
  misc_RNA (1)...(19): siRNA sense strand
caaccuaaagagcuagaaa

SEQ ID NO: 2673419 - RNA, 19 nt, Homo sapiens
  misc_RNA (1)...(19): siRNA sense strand
cugaagagaaggaagaguu

SEQ ID NO: 2673420 - RNA, 19 nt, Homo sapiens
  misc_RNA (1)...(19): siRNA sense strand
uagaaaguccagauggcaa

SEQ ID NO: 2673421 - RNA, 19 nt, Homo sapiens
  misc_RNA (1)...(19): siRNA sense strand
ccucgaagaauuucaggaa

SEQ ID NO: 2673422 - RNA, 19 nt, Homo sapiens
  misc_RNA (1)...(19): siRNA sense strand
gagcacuaugagaagauaa

SEQ ID NO: 2673423 - RNA, 19 nt, Homo sapiens
  misc_RNA (1)...(19): siRNA sense strand
aacacaaccuaaagagcua

SEQ ID NO: 2673424 - RNA, 19 nt, Homo sapiens
  misc_RNA (1)...(19): siRNA sense strand
agauguucucacagagcua

SEQ ID NO: 2673425 - RNA, 19 nt, Homo sapiens
  misc_RNA (1)...(19): siRNA sense strand
aggcagaacuggcugguug

SEQ ID NO: 2673426 - RNA, 19 nt, Homo sapiens
  misc_RNA (1)...(19): siRNA sense strand
cagagaagauacuuggaug

SEQ ID NO: 2673427 - RNA, 19 nt, Homo sapiens
  misc_RNA (1)...(19): siRNA sense strand
gugggaaaguguauggcaa

SEQ ID NO: 2673428 - RNA, 19 nt, Homo sapiens
  misc_RNA (1)...(19): siRNA sense strand
ccagagggucagugggcua

SEQ ID NO: 2673429 - RNA, 19 nt, Homo sapiens
  misc_RNA (1)...(19): siRNA sense strand
cggaugagcuacagaggca

SEQ ID NO: 2673430 - RNA, 19 nt, Homo sapiens
  misc_RNA (1)...(19): siRNA sense strand
cauuaauaucaguggcaau

SEQ ID NO: 2673431 - RNA, 19 nt, Homo sapiens
  misc_RNA (1)...(19): siRNA sense strand
cagcaauggcagugagucu

SEQ ID NO: 2673432 - RNA, 19 nt, Homo sapiens
  misc_RNA (1)...(19): siRNA sense strand
cagcagcacuggaggagga

SEQ ID NO: 2673433 - RNA, 19 nt, Homo sapiens
  misc_RNA (1)...(19): siRNA sense strand
ggacaggucaguuggcaga

SEQ ID NO: 2673434 - RNA, 19 nt, Homo sapiens
  misc_RNA (1)...(19): siRNA sense strand
gggcaaugguaaugguggu

SEQ ID NO: 2673435 - RNA, 19 nt, Homo sapiens
  misc_RNA (1)...(19): siRNA sense strand
gaauaagaagggaggccca

SEQ ID NO: 2673436 - RNA, 19 nt, Homo sapiens
  misc_RNA (1)...(19): siRNA sense strand
aaaaggaguugguggcaau

SEQ ID NO: 2673437 - RNA, 19 nt, Homo sapiens
  misc_RNA (1)...(19): siRNA sense strand
gcaaguucugacaggacua

SEQ ID NO: 2673438 - RNA, 19 nt, Homo sapiens
  misc_RNA (1)...(19): siRNA sense strand
ccaccagcaacaugggaau

SEQ ID NO: 2673439 - RNA, 19 nt, Homo sapiens
  misc_RNA (1)...(19): siRNA sense strand
agguggagaggaaggagaa

SEQ ID NO: 2673440 - RNA, 19 nt, Homo sapiens
  misc_RNA (1)...(19): siRNA sense strand
ucgaggaaguggaggcaac

SEQ ID NO: 2673441 - RNA, 19 nt, Homo sapiens
  misc_RNA (1)...(19): siRNA sense strand
cgaaguagcagcacaggca

SEQ ID NO: 2673442 - RNA, 19 nt, Homo sapiens
  misc_RNA (1)...(19): siRNA sense strand
agacucaguaugugaccaa

SEQ ID NO: 2673443 - RNA, 19 nt, Homo sapiens
  misc_RNA (1)...(19): siRNA sense strand
ccagaccguugaugggcaa

SEQ ID NO: 2673444 - RNA, 19 nt, Homo sapiens
  misc_RNA (1)...(19): siRNA sense strand
cuggucauacugugggaaa

SEQ ID NO: 2673445 - RNA, 19 nt, Homo sapiens
  misc_RNA (1)...(19): siRNA sense strand
aggaguugguggcaauaau

SEQ ID NO: 2673446 - RNA, 19 nt, Homo sapiens
  misc_RNA (1)...(19): siRNA sense strand
ccucaaaggaacagagugg

SEQ ID NO: 2673447 - RNA, 19 nt, Homo sapiens
  misc_RNA (1)...(19): siRNA sense strand
guaaagacagugaaggaag

SEQ ID NO: 2673448 - RNA, 19 nt, Homo sapiens
  misc_RNA (1)...(19): siRNA sense strand
ggaccaacucucaaggcca

SEQ ID NO: 2673449 - RNA, 19 nt, Homo sapiens
  misc_RNA (1)...(19): siRNA sense strand
gcauuggguacuucaggaa

SEQ ID NO: 2673450 - RNA, 19 nt, Homo sapiens
  misc_RNA (1)...(19): siRNA sense strand
cccaaugagaacagcaaca

SEQ ID NO: 2673451 - RNA, 19 nt, Homo sapiens
  misc_RNA (1)...(19): siRNA sense strand
ucaaaggaacagaguggca

SEQ ID NO: 2673452 - RNA, 19 nt, Homo sapiens
  misc_RNA (1)...(19): siRNA sense strand
gguggagaggaaggagaaa

SEQ ID NO: 2673453 - RNA, 19 nt, Homo sapiens
  misc_RNA (1)...(19): siRNA sense strand
gggcugguggugauggaau

SEQ ID NO: 2673454 - RNA, 19 nt, Homo sapiens
  misc_RNA (1)...(19): siRNA sense strand
ggaacagaguggcagcagu

SEQ ID NO: 2673455 - RNA, 19 nt, Homo sapiens
  misc_RNA (1)...(19): siRNA sense strand
cuuuacuaccaguggauca

SEQ ID NO: 2673456 - RNA, 19 nt, Homo sapiens
  misc_RNA (1)...(19): siRNA sense strand
cuucaggaauccaggugca

SEQ ID NO: 2673457 - RNA, 19 nt, Homo sapiens
  misc_RNA (1)...(19): siRNA sense strand
aaaugacagcuguggugaa

SEQ ID NO: 2673458 - RNA, 19 nt, Homo sapiens
  misc_RNA (1)...(19): siRNA sense strand
ggauacaaggagagguaga

SEQ ID NO: 2673459 - RNA, 19 nt, Homo sapiens
  misc_RNA (1)...(19): siRNA sense strand
agguggagaaugaggagaa

SEQ ID NO: 2673460 - RNA, 19 nt, Homo sapiens
  misc_RNA (1)...(19): siRNA sense strand
ucggauacaaggagaggua

SEQ ID NO: 2673461 - RNA, 19 nt, Homo sapiens
  misc_RNA (1)...(19): siRNA sense strand
ggaguuaguugcuggggua

SEQ ID NO: 2673462 - RNA, 19 nt, Homo sapiens
  misc_RNA (1)...(19): siRNA sense strand
cuaucuaaguuuaugccua

SEQ ID NO: 2673463 - RNA, 19 nt, Homo sapiens
  misc_RNA (1)...(19): siRNA sense strand
guagaaacccgaaaggcuu

SEQ ID NO: 2673464 - RNA, 19 nt, Homo sapiens
  misc_RNA (1)...(19): siRNA sense strand
aguaugggcccuuggagaa

SEQ ID NO: 2673465 - RNA, 19 nt, Homo sapiens
  misc_RNA (1)...(19): siRNA sense strand
aggagaaacugaaggagcu

SEQ ID NO: 2673466 - RNA, 19 nt, Homo sapiens
  misc_RNA (1)...(19): siRNA sense strand
cagaagaagaauaucggau

SEQ ID NO: 2673467 - RNA, 19 nt, Homo sapiens
  misc_RNA (1)...(19): siRNA sense strand
gguagaaacccgaaaggcu

SEQ ID NO: 2673468 - RNA, 19 nt, Homo sapiens
  misc_RNA (1)...(19): siRNA sense strand
ggagaaacugaaggagcua

SEQ ID NO: 2673469 - RNA, 19 nt, Homo sapiens
  misc_RNA (1)...(19): siRNA sense strand
gagauuauagagaaggaca

SEQ ID NO: 2673470 - RNA, 19 nt, Homo sapiens
  misc_RNA (1)...(19): siRNA sense strand
uggagaaugaggagaaacu

SEQ ID NO: 2673471 - RNA, 19 nt, Homo sapiens
  misc_RNA (1)...(19): siRNA sense strand
cugggaugacugugggaau

SEQ ID NO: 2673472 - RNA, 19 nt, Homo sapiens
  misc_RNA (1)...(19): siRNA sense strand
ccugcagaaagguguguaa

SEQ ID NO: 2673473 - RNA, 19 nt, Homo sapiens
  misc_RNA (1)...(19): siRNA sense strand
ggguaaggcacgugaggag

SEQ ID NO: 2673474 - RNA, 19 nt, Homo sapiens
  misc_RNA (1)...(19): siRNA sense strand
ggagguggcuugaggcaac

SEQ ID NO: 2673475 - RNA, 19 nt, Homo sapiens
  misc_RNA (1)...(19): siRNA sense strand
uuauagagaaggacaccaa

SEQ ID NO: 2673476 - RNA, 19 nt, Homo sapiens
  misc_RNA (1)...(19): siRNA sense strand
ccgaguaaauaguuccaga

SEQ ID NO: 2673477 - RNA, 19 nt, Homo sapiens
  misc_RNA (1)...(19): siRNA sense strand
cugcuaucacacagaacaa

SEQ ID NO: 2673478 - RNA, 19 nt, Homo sapiens
  misc_RNA (1)...(19): siRNA sense strand
cagaaagguguguaaggga

SEQ ID NO: 2673479 - RNA, 19 nt, Homo sapiens
  misc_RNA (1)...(19): siRNA sense strand
aggaugaaaucuaugagga

SEQ ID NO: 2673480 - RNA, 19 nt, Homo sapiens
  misc_RNA (1)...(19): siRNA sense strand
cccaaaauggcaugauaua

SEQ ID NO: 2673481 - RNA, 19 nt, Homo sapiens
  misc_RNA (1)...(19): siRNA sense strand
aguugagauuauagagaag

SEQ ID NO: 2673482 - RNA, 19 nt, Homo sapiens
  misc_RNA (1)...(19): siRNA sense strand
agaaacugaaggagcuaga

SEQ ID NO: 2673483 - RNA, 19 nt, Homo sapiens
  misc_RNA (1)...(19): siRNA sense strand
ucuccugacagaagaagaa

SEQ ID NO: 2673484 - RNA, 19 nt, Homo sapiens
  misc_RNA (1)...(19): siRNA sense strand
agcuagagcaguuuaguau

SEQ ID NO: 2673485 - RNA, 19 nt, Homo sapiens
  misc_RNA (1)...(19): siRNA sense strand
ggucuacggcacagcugaa

SEQ ID NO: 2673486 - RNA, 19 nt, Homo sapiens
  misc_RNA (1)...(19): siRNA sense strand
auucaugaguuuugcagua

SEQ ID NO: 2673487 - RNA, 19 nt, Homo sapiens
  misc_RNA (1)...(19): siRNA sense strand
aaguaugggcccuuggaga

SEQ ID NO: 2673488 - RNA, 19 nt, Homo sapiens
  misc_RNA (1)...(19): siRNA sense strand
ccggcaagaucguggacca

SEQ ID NO: 2673489 - RNA, 19 nt, Homo sapiens
  misc_RNA (1)...(19): siRNA sense strand
gccaaagagucacgcgcuu

SEQ ID NO: 2673490 - RNA, 19 nt, Homo sapiens
  misc_RNA (1)...(19): siRNA sense strand
guggaguaugagaagacaa

SEQ ID NO: 2673491 - RNA, 19 nt, Homo sapiens
  misc_RNA (1)...(19): siRNA sense strand
cugagaauguugauggaaa

SEQ ID NO: 2673492 - RNA, 19 nt, Homo sapiens
  misc_RNA (1)...(19): siRNA sense strand
caggaagagugcagggcaa

SEQ ID NO: 2673493 - RNA, 19 nt, Homo sapiens
  misc_RNA (1)...(19): siRNA sense strand
acuuagaaauguuggacaa

SEQ ID NO: 2673494 - RNA, 19 nt, Homo sapiens
  misc_RNA (1)...(19): siRNA sense strand
gguaacugaaugugagaua

SEQ ID NO: 2673495 - RNA, 19 nt, Homo sapiens
  misc_RNA (1)...(19): siRNA sense strand
ugagaauguugauggaaau

SEQ ID NO: 2673496 - RNA, 19 nt, Homo sapiens
  misc_RNA (1)...(19): siRNA sense strand
gaccaaauggauaaggaaa

SEQ ID NO: 2673497 - RNA, 19 nt, Homo sapiens
  misc_RNA (1)...(19): siRNA sense strand
cguuaaaggagauguccaa

SEQ ID NO: 2673498 - RNA, 19 nt, Homo sapiens
  misc_RNA (1)...(19): siRNA sense strand
cagaaaacaugcagauaau

SEQ ID NO: 2673499 - RNA, 19 nt, Homo sapiens
  misc_RNA (1)...(19): siRNA sense strand
aguucaaggcagugcuaaa

SEQ ID NO: 2673500 - RNA, 19 nt, Homo sapiens
  misc_RNA (1)...(19): siRNA sense strand
uuacagaagcagagauuga

SEQ ID NO: 2673501 - RNA, 19 nt, Homo sapiens
  misc_RNA (1)...(19): siRNA sense strand
cuauauagaggaugaaaga

SEQ ID NO: 2673502 - RNA, 19 nt, Homo sapiens
  misc_RNA (1)...(19): siRNA sense strand
gagaauaugcagagcgacu

SEQ ID NO: 2673503 - RNA, 19 nt, Homo sapiens
  misc_RNA (1)...(19): siRNA sense strand
guacaaggaaauaguaaca

SEQ ID NO: 2673504 - RNA, 19 nt, Homo sapiens
  misc_RNA (1)...(19): siRNA sense strand
uggauauggccuauggaaa

SEQ ID NO: 2673505 - RNA, 19 nt, Homo sapiens
  misc_RNA (1)...(19): siRNA sense strand
ggaagaggcagcacagcaa

SEQ ID NO: 2673506 - RNA, 19 nt, Homo sapiens
  misc_RNA (1)...(19): siRNA sense strand
aaagcaggcagaagagaaa

SEQ ID NO: 2673507 - RNA, 19 nt, Homo sapiens
  misc_RNA (1)...(19): siRNA sense strand
agaagcugcuggagaauau

SEQ ID NO: 2673508 - RNA, 19 nt, Homo sapiens
  misc_RNA (1)...(19): siRNA sense strand
gugaagaagcugcuggaga

SEQ ID NO: 2673509 - RNA, 19 nt, Homo sapiens
  misc_RNA (1)...(19): siRNA sense strand
caguauggacagcuggaaa

SEQ ID NO: 2673510 - RNA, 19 nt, Homo sapiens
  misc_RNA (1)...(19): siRNA sense strand
caaguaugauugaaggaga

SEQ ID NO: 2673511 - RNA, 19 nt, Homo sapiens
  misc_RNA (1)...(19): siRNA sense strand
ccagaaaacaugcagauaa

SEQ ID NO: 2673512 - RNA, 19 nt, Homo sapiens
  misc_RNA (1)...(19): siRNA sense strand
aggaaauaguaacagaaga

SEQ ID NO: 2673513 - RNA, 19 nt, Homo sapiens
  misc_RNA (1)...(19): siRNA sense strand
cuuauuggcuagugggcau

SEQ ID NO: 2673514 - RNA, 19 nt, Homo sapiens
  misc_RNA (1)...(19): siRNA sense strand
gcauuugaauauaggggaa

SEQ ID NO: 2673515 - RNA, 19 nt, Homo sapiens
  misc_RNA (1)...(19): siRNA sense strand
auggacagcuggaaacaaa

SEQ ID NO: 2673516 - RNA, 19 nt, Homo sapiens
  misc_RNA (1)...(19): siRNA sense strand
gcuaggagagcuugaaaca

SEQ ID NO: 2673517 - RNA, 19 nt, Homo sapiens
  misc_RNA (1)...(19): siRNA sense strand
aagcaguggugaaugagaa

SEQ ID NO: 2673518 - RNA, 19 nt, Homo sapiens
  misc_RNA (1)...(19): siRNA sense strand
gaucuuugucaguugguua

SEQ ID NO: 2673519 - RNA, 19 nt, Homo sapiens
  misc_RNA (1)...(19): siRNA sense strand
uaugauugaaggagagcua

SEQ ID NO: 2673520 - RNA, 19 nt, Homo sapiens
  misc_RNA (1)...(19): siRNA sense strand
accaaauggauaaggaaau

SEQ ID NO: 2673521 - RNA, 19 nt, Homo sapiens
  misc_RNA (1)...(19): siRNA sense strand
cuggaaaauuugacaguau

SEQ ID NO: 2673522 - RNA, 19 nt, Homo sapiens
  misc_RNA (1)...(19): siRNA sense strand
cuaaggaauuuguugguca

SEQ ID NO: 2673523 - RNA, 19 nt, Homo sapiens
  misc_RNA (1)...(19): siRNA sense strand
aagcaauggauauggccua

SEQ ID NO: 2673524 - RNA, 19 nt, Homo sapiens
  misc_RNA (1)...(19): siRNA sense strand
cccaauaaguucagaugca

SEQ ID NO: 2673525 - RNA, 19 nt, Homo sapiens
  misc_RNA (1)...(19): siRNA sense strand
aaacaauugcugcacgaaa

SEQ ID NO: 2673526 - RNA, 19 nt, Homo sapiens
  misc_RNA (1)...(19): siRNA sense strand
guuugaaagcucacaguau

SEQ ID NO: 2673527 - RNA, 19 nt, Homo sapiens
  misc_RNA (1)...(19): siRNA sense strand
cgacucaagcaguuagaau

SEQ ID NO: 2673528 - RNA, 19 nt, Homo sapiens
  misc_RNA (1)...(19): siRNA sense strand
acaaggaaauaguaacaga

SEQ ID NO: 2673529 - RNA, 19 nt, Homo sapiens
  misc_RNA (1)...(19): siRNA sense strand
gcuaccagcauuugaauau

SEQ ID NO: 2673530 - RNA, 19 nt, Homo sapiens
  misc_RNA (1)...(19): siRNA sense strand
acaucagaccaaauggaua

SEQ ID NO: 2673531 - RNA, 19 nt, Homo sapiens
  misc_RNA (1)...(19): siRNA sense strand
agagaaaggaguuguuuua

SEQ ID NO: 2673532 - RNA, 19 nt, Homo sapiens
  misc_RNA (1)...(19): siRNA sense strand
caguauguggccagaacua

SEQ ID NO: 2673533 - RNA, 19 nt, Homo sapiens
  misc_RNA (1)...(19): siRNA sense strand
ugaacgacacagagauauu

SEQ ID NO: 2673534 - RNA, 19 nt, Homo sapiens
  misc_RNA (1)...(19): siRNA sense strand
cuuccaaggcaacaaguaa

SEQ ID NO: 2673535 - RNA, 19 nt, Homo sapiens
  misc_RNA (1)...(19): siRNA sense strand
aggcaacaaguaacagaaa

SEQ ID NO: 2673536 - RNA, 19 nt, Homo sapiens
  misc_RNA (1)...(19): siRNA sense strand
uggagaauaugcagagcga

SEQ ID NO: 2673537 - RNA, 19 nt, Homo sapiens
  misc_RNA (1)...(19): siRNA sense strand
cuagugggcaugacagaaa

SEQ ID NO: 2673538 - RNA, 19 nt, Homo sapiens
  misc_RNA (1)...(19): siRNA sense strand
uagaaauguuggacaaagu

SEQ ID NO: 2673539 - RNA, 19 nt, Homo sapiens
  misc_RNA (1)...(19): siRNA sense strand
uuaaaggagauguccaaua

SEQ ID NO: 2673540 - RNA, 19 nt, Homo sapiens
  misc_RNA (1)...(19): siRNA sense strand
ccucgaauuacuugaguca

SEQ ID NO: 2673541 - RNA, 19 nt, Homo sapiens
  misc_RNA (1)...(19): siRNA sense strand
ggccaaaguguuaugauga

SEQ ID NO: 2673542 - RNA, 19 nt, Homo sapiens
  misc_RNA (1)...(19): siRNA sense strand
caguacaguucuaacaaca

SEQ ID NO: 2673543 - RNA, 19 nt, Homo sapiens
  misc_RNA (1)...(19): siRNA sense strand
acuuacagcuuuagauguu

SEQ ID NO: 2673544 - RNA, 19 nt, Homo sapiens
  misc_RNA (1)...(19): siRNA sense strand
gaaccaaggaaccgaagau

SEQ ID NO: 2673545 - RNA, 19 nt, Homo sapiens
  misc_RNA (1)...(19): siRNA sense strand
ugguacaaggaaauaguaa

SEQ ID NO: 2673546 - RNA, 19 nt, Homo sapiens
  misc_RNA (1)...(19): siRNA sense strand
cucuagaagcaauggauau

SEQ ID NO: 2673547 - RNA, 19 nt, Homo sapiens
  misc_RNA (1)...(19): siRNA sense strand
uuugauugcuugugguuau

SEQ ID NO: 2673548 - RNA, 19 nt, Homo sapiens
  misc_RNA (1)...(19): siRNA sense strand
gcaaaaguugggagucaua

SEQ ID NO: 2673549 - RNA, 19 nt, Homo sapiens
  misc_RNA (1)...(19): siRNA sense strand
gcagaaagguucauggcaa

SEQ ID NO: 2673550 - RNA, 19 nt, Homo sapiens
  misc_RNA (1)...(19): siRNA sense strand
ggagaugacuauugcgaca

SEQ ID NO: 2673551 - RNA, 19 nt, Homo sapiens
  misc_RNA (1)...(19): siRNA sense strand
caugaaacucagagaauau

SEQ ID NO: 2673552 - RNA, 19 nt, Homo sapiens
  misc_RNA (1)...(19): siRNA sense strand
gcaucagugcagagagcaa

SEQ ID NO: 2673553 - RNA, 19 nt, Homo sapiens
  misc_RNA (1)...(19): siRNA sense strand
ucgagaaugaagagguuaa

SEQ ID NO: 2673554 - RNA, 19 nt, Homo sapiens
  misc_RNA (1)...(19): siRNA sense strand
agacaauugcucaggauau

SEQ ID NO: 2673555 - RNA, 19 nt, Homo sapiens
  misc_RNA (1)...(19): siRNA sense strand
aagcagagauucauggaga

SEQ ID NO: 2673556 - RNA, 19 nt, Homo sapiens
  misc_RNA (1)...(19): siRNA sense strand
gagagaaagcaaagaccau

SEQ ID NO: 2673557 - RNA, 19 nt, Homo sapiens
  misc_RNA (1)...(19): siRNA sense strand
cugaaauugagacggaaua

SEQ ID NO: 2673558 - RNA, 19 nt, Homo sapiens
  misc_RNA (1)...(19): siRNA sense strand
uggcugaugaccagaguaa

SEQ ID NO: 2673559 - RNA, 19 nt, Homo sapiens
  misc_RNA (1)...(19): siRNA sense strand
caauagaagcaauagccaa

SEQ ID NO: 2673560 - RNA, 19 nt, Homo sapiens
  misc_RNA (1)...(19): siRNA sense strand
aaccaaguaaggagagaaa

SEQ ID NO: 2673561 - RNA, 19 nt, Homo sapiens
  misc_RNA (1)...(19): siRNA sense strand
uccgagaacuggagagaca

SEQ ID NO: 2673562 - RNA, 19 nt, Homo sapiens
  misc_RNA (1)...(19): siRNA sense strand
aguaaggagagaaagcaaa

SEQ ID NO: 2673563 - RNA, 19 nt, Homo sapiens
  misc_RNA (1)...(19): siRNA sense strand
agaaugaagagguuaagaa

SEQ ID NO: 2673564 - RNA, 19 nt, Homo sapiens
  misc_RNA (1)...(19): siRNA sense strand
ugagaaugcaguugauaau

SEQ ID NO: 2673565 - RNA, 19 nt, Homo sapiens
  misc_RNA (1)...(19): siRNA sense strand
acagacaagucaugcacaa

SEQ ID NO: 2673566 - RNA, 19 nt, Homo sapiens
  misc_RNA (1)...(19): siRNA sense strand
gcugaaauugagacggaau

SEQ ID NO: 2673567 - RNA, 19 nt, Homo sapiens
  misc_RNA (1)...(19): siRNA sense strand
gguggaagucaaugauauu

SEQ ID NO: 2673568 - RNA, 19 nt, Homo sapiens
  misc_RNA (1)...(19): siRNA sense strand
caugcaaccuugagugaca

SEQ ID NO: 2673569 - RNA, 19 nt, Homo sapiens
  misc_RNA (1)...(19): siRNA sense strand
ggaaaagcaaauugggaga

SEQ ID NO: 2673570 - RNA, 19 nt, Homo sapiens
  misc_RNA (1)...(19): siRNA sense strand
ucacaaaacuucaagccaa

SEQ ID NO: 2673571 - RNA, 19 nt, Homo sapiens
  misc_RNA (1)...(19): siRNA sense strand
aaguaaggagagaaagcaa

SEQ ID NO: 2673572 - RNA, 19 nt, Homo sapiens
  misc_RNA (1)...(19): siRNA sense strand
cugaaaccuaccugaguaa

SEQ ID NO: 2673573 - RNA, 19 nt, Homo sapiens
  misc_RNA (1)...(19): siRNA sense strand
gauucaagaaggacaaaga

SEQ ID NO: 2673574 - RNA, 19 nt, Homo sapiens
  misc_RNA (1)...(19): siRNA sense strand
ggagagacaucaacggcga

SEQ ID NO: 2673575 - RNA, 19 nt, Homo sapiens
  misc_RNA (1)...(19): siRNA sense strand
agguggaagucaaugauau

SEQ ID NO: 2673576 - RNA, 19 nt, Homo sapiens
  misc_RNA (1)...(19): siRNA sense strand
gugcagagagcaagcugaa

SEQ ID NO: 2673577 - RNA, 19 nt, Homo sapiens
  misc_RNA (1)...(19): siRNA sense strand
uggaggaaguggaccaaga

SEQ ID NO: 2673578 - RNA, 19 nt, Homo sapiens
  misc_RNA (1)...(19): siRNA sense strand
aguacagcgaugagaauau

SEQ ID NO: 2673579 - RNA, 19 nt, Homo sapiens
  misc_RNA (1)...(19): siRNA sense strand
acaugagggcuuagacauu

SEQ ID NO: 2673580 - RNA, 19 nt, Homo sapiens
  misc_RNA (1)...(19): siRNA sense strand
ggagcgauaagcagagauu

SEQ ID NO: 2673581 - RNA, 19 nt, Homo sapiens
  misc_RNA (1)...(19): siRNA sense strand
cacaaaacuucaagccaaa

SEQ ID NO: 2673582 - RNA, 19 nt, Homo sapiens
  misc_RNA (1)...(19): siRNA sense strand
ccagaguaaccaugauauu

SEQ ID NO: 2673583 - RNA, 19 nt, Homo sapiens
  misc_RNA (1)...(19): siRNA sense strand
aggcacaugugaaugaaau

SEQ ID NO: 2673584 - RNA, 19 nt, Homo sapiens
  misc_RNA (1)...(19): siRNA sense strand
ucccagaaauacaggauca

SEQ ID NO: 2673585 - RNA, 19 nt, Homo sapiens
  misc_RNA (1)...(19): siRNA sense strand
uugagaaugcaguugauaa

SEQ ID NO: 2673586 - RNA, 19 nt, Homo sapiens
  misc_RNA (1)...(19): siRNA sense strand
gagaauauuuggaaggcag

SEQ ID NO: 2673587 - RNA, 19 nt, Homo sapiens
  misc_RNA (1)...(19): siRNA sense strand
gcugaauauaugacuacaa

SEQ ID NO: 2673588 - RNA, 19 nt, Homo sapiens
  misc_RNA (1)...(19): siRNA sense strand
gagacaauugcucaggaua

SEQ ID NO: 2673589 - RNA, 19 nt, Homo sapiens
  misc_RNA (1)...(19): siRNA sense strand
caagaaggacaaagagauc

SEQ ID NO: 2673590 - RNA, 19 nt, Homo sapiens
  misc_RNA (1)...(19): siRNA sense strand
acaaagagaucauagccga

SEQ ID NO: 2673591 - RNA, 19 nt, Homo sapiens
  misc_RNA (1)...(19): siRNA sense strand
uggcccuguuuaugagaaa

SEQ ID NO: 2673592 - RNA, 19 nt, Homo sapiens
  misc_RNA (1)...(19): siRNA sense strand
agaaauguauggcuggaga

SEQ ID NO: 2673593 - RNA, 19 nt, Homo sapiens
  misc_RNA (1)...(19): siRNA sense strand
cacuaaggaucaucaacaa

SEQ ID NO: 2673594 - RNA, 19 nt, Homo sapiens
  misc_RNA (1)...(19): siRNA sense strand
cuuuauacggugaugaaaa

SEQ ID NO: 2673595 - RNA, 19 nt, Homo sapiens
  misc_RNA (1)...(19): siRNA sense strand
gcucaggauauugaagaaa

SEQ ID NO: 2673596 - RNA, 19 nt, Homo sapiens
  misc_RNA (1)...(19): siRNA sense strand
gggagaaggucauagagcu

SEQ ID NO: 2673597 - RNA, 19 nt, Homo sapiens
  misc_RNA (1)...(19): siRNA sense strand
aagcugaaauugagacgga

SEQ ID NO: 2673598 - RNA, 19 nt, Homo sapiens
  misc_RNA (1)...(19): siRNA sense strand
agcgauaagcagagauuca

SEQ ID NO: 2673599 - RNA, 19 nt, Homo sapiens
  misc_RNA (1)...(19): siRNA sense strand
aaucgagaaugaagagguu

SEQ ID NO: 2673600 - RNA, 19 nt, Homo sapiens
  misc_RNA (1)...(19): siRNA sense strand
aguauauaguggugcagga

SEQ ID NO: 2673601 - RNA, 19 nt, Homo sapiens
  misc_RNA (1)...(19): siRNA sense strand
ucaagaaggacaaagagau

SEQ ID NO: 2673602 - RNA, 19 nt, Homo sapiens
  misc_RNA (1)...(19): siRNA sense strand
agaaggucauagagcugaa

SEQ ID NO: 2673603 - RNA, 19 nt, Homo sapiens
  misc_RNA (1)...(19): siRNA sense strand
aagcaauagccaaguuuga

SEQ ID NO: 2673604 - RNA, 19 nt, Homo sapiens
  misc_RNA (1)...(19): siRNA sense strand
ggagagaaagcaaagacca

SEQ ID NO: 2673605 - RNA, 19 nt, Homo sapiens
  misc_RNA (1)...(19): siRNA sense strand
agaaggacaaagagaucau

SEQ ID NO: 2673606 - RNA, 19 nt, Homo sapiens
  misc_RNA (1)...(19): siRNA sense strand
uugcagacgauacaagaua

SEQ ID NO: 2673607 - RNA, 19 nt, Homo sapiens
  misc_RNA (1)...(19): siRNA sense strand
gugaaaauccuuuggcuga

SEQ ID NO: 2673608 - RNA, 19 nt, Homo sapiens
  misc_RNA (1)...(19): siRNA sense strand
acaagaagcacuaaggauc

SEQ ID NO: 2673609 - RNA, 19 nt, Homo sapiens
  misc_RNA (1)...(19): siRNA sense strand
cgcucaaaaucgagaauga

SEQ ID NO: 2673610 - RNA, 19 nt, Homo sapiens
  misc_RNA (1)...(19): siRNA sense strand
aaacaugacuugcugcaga

SEQ ID NO: 2673611 - RNA, 19 nt, Homo sapiens
  misc_RNA (1)...(19): siRNA sense strand
gcagaggacccugggagaa

SEQ ID NO: 2673612 - RNA, 19 nt, Homo sapiens
  misc_RNA (1)...(19): siRNA sense strand
cagaaauacaggaucaagu

SEQ ID NO: 2673613 - RNA, 19 nt, Homo sapiens
  misc_RNA (1)...(19): siRNA sense strand
cauuggaggaaguggacca

SEQ ID NO: 2673614 - RNA, 19 nt, Homo sapiens
  misc_RNA (1)...(19): siRNA sense strand
agaaguuagcagaaagguu

SEQ ID NO: 2673615 - RNA, 19 nt, Homo sapiens
  misc_RNA (1)...(19): siRNA sense strand
augaagagguuaagaaaac

SEQ ID NO: 2673616 - RNA, 19 nt, Homo sapiens
  misc_RNA (1)...(19): siRNA sense strand
ggagaaggucauagagcug

SEQ ID NO: 2673617 - RNA, 19 nt, Homo sapiens
  misc_RNA (1)...(19): siRNA sense strand
ugaagaugaaugugagcca

SEQ ID NO: 2673618 - RNA, 19 nt, Homo sapiens
  misc_RNA (1)...(19): siRNA sense strand
ggccagucacggaagacaa

SEQ ID NO: 2673619 - RNA, 19 nt, Homo sapiens
  misc_RNA (1)...(19): siRNA sense strand
gcagaaagguucauggcaa

SEQ ID NO: 2673620 - RNA, 19 nt, Homo sapiens
  misc_RNA (1)...(19): siRNA sense strand
ggagaugacuauugcgaca

SEQ ID NO: 2673621 - RNA, 19 nt, Homo sapiens
  misc_RNA (1)...(19): siRNA sense strand
caugaaacucagagaauau

SEQ ID NO: 2673622 - RNA, 19 nt, Homo sapiens
  misc_RNA (1)...(19): siRNA sense strand
gcaucagugcagagagcaa

SEQ ID NO: 2673623 - RNA, 19 nt, Homo sapiens
  misc_RNA (1)...(19): siRNA sense strand
ucgagaaugaagagguuaa

SEQ ID NO: 2673624 - RNA, 19 nt, Homo sapiens
  misc_RNA (1)...(19): siRNA sense strand
agacaauugcucaggauau

SEQ ID NO: 2673625 - RNA, 19 nt, Homo sapiens
  misc_RNA (1)...(19): siRNA sense strand
aagcagagauucauggaga

SEQ ID NO: 2673626 - RNA, 19 nt, Homo sapiens
  misc_RNA (1)...(19): siRNA sense strand
gagagaaagcaaagaccau

SEQ ID NO: 2673627 - RNA, 19 nt, Homo sapiens
  misc_RNA (1)...(19): siRNA sense strand
cugaaauugagacggaaua

SEQ ID NO: 2673628 - RNA, 19 nt, Homo sapiens
  misc_RNA (1)...(19): siRNA sense strand
uggcugaugaccagaguaa

SEQ ID NO: 2673629 - RNA, 19 nt, Homo sapiens
  misc_RNA (1)...(19): siRNA sense strand
caauagaagcaauagccaa

SEQ ID NO: 2673630 - RNA, 19 nt, Homo sapiens
  misc_RNA (1)...(19): siRNA sense strand
aaccaaguaaggagagaaa

SEQ ID NO: 2673631 - RNA, 19 nt, Homo sapiens
  misc_RNA (1)...(19): siRNA sense strand
uccgagaacuggagagaca

SEQ ID NO: 2673632 - RNA, 19 nt, Homo sapiens
  misc_RNA (1)...(19): siRNA sense strand
aguaaggagagaaagcaaa

SEQ ID NO: 2673633 - RNA, 19 nt, Homo sapiens
  misc_RNA (1)...(19): siRNA sense strand
agaaugaagagguuaagaa

SEQ ID NO: 2673634 - RNA, 19 nt, Homo sapiens
  misc_RNA (1)...(19): siRNA sense strand
ugagaaugcaguugauaau

SEQ ID NO: 2673635 - RNA, 19 nt, Homo sapiens
  misc_RNA (1)...(19): siRNA sense strand
acagacaagucaugcacaa

SEQ ID NO: 2673636 - RNA, 19 nt, Homo sapiens
  misc_RNA (1)...(19): siRNA sense strand
gcugaaauugagacggaau

SEQ ID NO: 2673637 - RNA, 19 nt, Homo sapiens
  misc_RNA (1)...(19): siRNA sense strand
gguggaagucaaugauauu

SEQ ID NO: 2673638 - RNA, 19 nt, Homo sapiens
  misc_RNA (1)...(19): siRNA sense strand
caugcaaccuugagugaca

SEQ ID NO: 2673639 - RNA, 19 nt, Homo sapiens
  misc_RNA (1)...(19): siRNA sense strand
ggaaaagcaaauugggaga

SEQ ID NO: 2673640 - RNA, 19 nt, Homo sapiens
  misc_RNA (1)...(19): siRNA sense strand
ucacaaaacuucaagccaa

SEQ ID NO: 2673641 - RNA, 19 nt, Homo sapiens
  misc_RNA (1)...(19): siRNA sense strand
aaguaaggagagaaagcaa

SEQ ID NO: 2673642 - RNA, 19 nt, Homo sapiens
  misc_RNA (1)...(19): siRNA sense strand
cugaaaccuaccugaguaa

SEQ ID NO: 2673643 - RNA, 19 nt, Homo sapiens
  misc_RNA (1)...(19): siRNA sense strand
gauucaagaaggacaaaga

SEQ ID NO: 2673644 - RNA, 19 nt, Homo sapiens
  misc_RNA (1)...(19): siRNA sense strand
ggagagacaucaacggcga

SEQ ID NO: 2673645 - RNA, 19 nt, Homo sapiens
  misc_RNA (1)...(19): siRNA sense strand
agguggaagucaaugauau

SEQ ID NO: 2673646 - RNA, 19 nt, Homo sapiens
  misc_RNA (1)...(19): siRNA sense strand
gugcagagagcaagcugaa

SEQ ID NO: 2673647 - RNA, 19 nt, Homo sapiens
  misc_RNA (1)...(19): siRNA sense strand
uggaggaaguggaccaaga

SEQ ID NO: 2673648 - RNA, 19 nt, Homo sapiens
  misc_RNA (1)...(19): siRNA sense strand
aguacagcgaugagaauau

SEQ ID NO: 2673649 - RNA, 19 nt, Homo sapiens
  misc_RNA (1)...(19): siRNA sense strand
acaugagggcuuagacauu

SEQ ID NO: 2673650 - RNA, 19 nt, Homo sapiens
  misc_RNA (1)...(19): siRNA sense strand
ggagcgauaagcagagauu

SEQ ID NO: 2673651 - RNA, 19 nt, Homo sapiens
  misc_RNA (1)...(19): siRNA sense strand
cacaaaacuucaagccaaa

SEQ ID NO: 2673652 - RNA, 19 nt, Homo sapiens
  misc_RNA (1)...(19): siRNA sense strand
ccagaguaaccaugauauu

SEQ ID NO: 2673653 - RNA, 19 nt, Homo sapiens
  misc_RNA (1)...(19): siRNA sense strand
aggcacaugugaaugaaau

SEQ ID NO: 2673654 - RNA, 19 nt, Homo sapiens
  misc_RNA (1)...(19): siRNA sense strand
ucccagaaauacaggauca

SEQ ID NO: 2673655 - RNA, 19 nt, Homo sapiens
  misc_RNA (1)...(19): siRNA sense strand
uugagaaugcaguugauaa

SEQ ID NO: 2673656 - RNA, 19 nt, Homo sapiens
  misc_RNA (1)...(19): siRNA sense strand
gagaauauuuggaaggcag

SEQ ID NO: 2673657 - RNA, 19 nt, Homo sapiens
  misc_RNA (1)...(19): siRNA sense strand
gcugaauauaugacuacaa

SEQ ID NO: 2673658 - RNA, 19 nt, Homo sapiens
  misc_RNA (1)...(19): siRNA sense strand
gagacaauugcucaggaua

SEQ ID NO: 2673659 - RNA, 19 nt, Homo sapiens
  misc_RNA (1)...(19): siRNA sense strand
caagaaggacaaagagauc

SEQ ID NO: 2673660 - RNA, 19 nt, Homo sapiens
  misc_RNA (1)...(19): siRNA sense strand
acaaagagaucauagccga

SEQ ID NO: 2673661 - RNA, 19 nt, Homo sapiens
  misc_RNA (1)...(19): siRNA sense strand
uggcccuguuuaugagaaa

SEQ ID NO: 2673662 - RNA, 19 nt, Homo sapiens
  misc_RNA (1)...(19): siRNA sense strand
agaaauguauggcuggaga

SEQ ID NO: 2673663 - RNA, 19 nt, Homo sapiens
  misc_RNA (1)...(19): siRNA sense strand
cacuaaggaucaucaacaa

SEQ ID NO: 2673664 - RNA, 19 nt, Homo sapiens
  misc_RNA (1)...(19): siRNA sense strand
cuuuauacggugaugaaaa

SEQ ID NO: 2673665 - RNA, 19 nt, Homo sapiens
  misc_RNA (1)...(19): siRNA sense strand
gcucaggauauugaagaaa

SEQ ID NO: 2673666 - RNA, 19 nt, Homo sapiens
  misc_RNA (1)...(19): siRNA sense strand
gggagaaggucauagagcu

SEQ ID NO: 2673667 - RNA, 19 nt, Homo sapiens
  misc_RNA (1)...(19): siRNA sense strand
aagcugaaauugagacgga

SEQ ID NO: 2673668 - RNA, 19 nt, Homo sapiens
  misc_RNA (1)...(19): siRNA sense strand
agcgauaagcagagauuca

SEQ ID NO: 2673669 - RNA, 19 nt, Homo sapiens
  misc_RNA (1)...(19): siRNA sense strand
aaucgagaaugaagagguu

SEQ ID NO: 2673670 - RNA, 19 nt, Homo sapiens
  misc_RNA (1)...(19): siRNA sense strand
aguauauaguggugcagga

SEQ ID NO: 2673671 - RNA, 19 nt, Homo sapiens
  misc_RNA (1)...(19): siRNA sense strand
ucaagaaggacaaagagau

SEQ ID NO: 2673672 - RNA, 19 nt, Homo sapiens
  misc_RNA (1)...(19): siRNA sense strand
agaaggucauagagcugaa

SEQ ID NO: 2673673 - RNA, 19 nt, Homo sapiens
  misc_RNA (1)...(19): siRNA sense strand
aagcaauagccaaguuuga

SEQ ID NO: 2673674 - RNA, 19 nt, Homo sapiens
  misc_RNA (1)...(19): siRNA sense strand
ggagagaaagcaaagacca

SEQ ID NO: 2673675 - RNA, 19 nt, Homo sapiens
  misc_RNA (1)...(19): siRNA sense strand
agaaggacaaagagaucau

SEQ ID NO: 2673676 - RNA, 19 nt, Homo sapiens
  misc_RNA (1)...(19): siRNA sense strand
uugcagacgauacaagaua

SEQ ID NO: 2673677 - RNA, 19 nt, Homo sapiens
  misc_RNA (1)...(19): siRNA sense strand
gugaaaauccuuuggcuga

SEQ ID NO: 2673678 - RNA, 19 nt, Homo sapiens
  misc_RNA (1)...(19): siRNA sense strand
acaagaagcacuaaggauc

SEQ ID NO: 2673679 - RNA, 19 nt, Homo sapiens
  misc_RNA (1)...(19): siRNA sense strand
cgcucaaaaucgagaauga

SEQ ID NO: 2673680 - RNA, 19 nt, Homo sapiens
  misc_RNA (1)...(19): siRNA sense strand
aaacaugacuugcugcaga

SEQ ID NO: 2673681 - RNA, 19 nt, Homo sapiens
  misc_RNA (1)...(19): siRNA sense strand
gcagaggacccugggagaa

SEQ ID NO: 2673682 - RNA, 19 nt, Homo sapiens
  misc_RNA (1)...(19): siRNA sense strand
cagaaauacaggaucaagu

SEQ ID NO: 2673683 - RNA, 19 nt, Homo sapiens
  misc_RNA (1)...(19): siRNA sense strand
cauuggaggaaguggacca

SEQ ID NO: 2673684 - RNA, 19 nt, Homo sapiens
  misc_RNA (1)...(19): siRNA sense strand
agaaguuagcagaaagguu

SEQ ID NO: 2673685 - RNA, 19 nt, Homo sapiens
  misc_RNA (1)...(19): siRNA sense strand
augaagagguuaagaaaac

SEQ ID NO: 2673686 - RNA, 19 nt, Homo sapiens
  misc_RNA (1)...(19): siRNA sense strand
ggagaaggucauagagcug

SEQ ID NO: 2673687 - RNA, 19 nt, Homo sapiens
  misc_RNA (1)...(19): siRNA sense strand
ugaagaugaaugugagcca

SEQ ID NO: 2673688 - RNA, 19 nt, Homo sapiens
  misc_RNA (1)...(19): siRNA sense strand
ggccagucacggaagacaa

SEQ ID NO: 2673689 - RNA, 19 nt, Homo sapiens
  misc_RNA (1)...(19): siRNA sense strand
uugccggagucuagggaua

SEQ ID NO: 2673690 - RNA, 19 nt, Homo sapiens
  misc_RNA (1)...(19): siRNA sense strand
cuacaaaaucaaagccaaa

SEQ ID NO: 2673691 - RNA, 19 nt, Homo sapiens
  misc_RNA (1)...(19): siRNA sense strand
agucaaacagugucaggaa

SEQ ID NO: 2673692 - RNA, 19 nt, Homo sapiens
  misc_RNA (1)...(19): siRNA sense strand
aaucaaagccaaaggguug

SEQ ID NO: 2673693 - RNA, 19 nt, Homo sapiens
  misc_RNA (1)...(19): siRNA sense strand
agaaagucaaggaagaaaa

SEQ ID NO: 2673694 - RNA, 19 nt, Homo sapiens
  misc_RNA (1)...(19): siRNA sense strand
gacaauucuuugaggagga

SEQ ID NO: 2673695 - RNA, 19 nt, Homo sapiens
  misc_RNA (1)...(19): siRNA sense strand
agagaagaauucagguacu

SEQ ID NO: 2673696 - RNA, 19 nt, Homo sapiens
  misc_RNA (1)...(19): siRNA sense strand
uggccaguauugugaaaca

SEQ ID NO: 2673697 - RNA, 19 nt, Homo sapiens
  misc_RNA (1)...(19): siRNA sense strand
ggauaauguccuuucuaca

SEQ ID NO: 2673698 - RNA, 19 nt, Homo sapiens
  misc_RNA (1)...(19): siRNA sense strand
aagaaagucaaggaagaaa

SEQ ID NO: 2673699 - RNA, 19 nt, Homo sapiens
  misc_RNA (1)...(19): siRNA sense strand
agauagagaaaucagccaa

SEQ ID NO: 2673700 - RNA, 19 nt, Homo sapiens
  misc_RNA (1)...(19): siRNA sense strand
ccaaaggguugaugagcug

SEQ ID NO: 2673701 - RNA, 19 nt, Homo sapiens
  misc_RNA (1)...(19): siRNA sense strand
agaaacagaaaccgaguca

SEQ ID NO: 2673702 - RNA, 19 nt, Homo sapiens
  misc_RNA (1)...(19): siRNA sense strand
cuaacaacaagaaagucaa

SEQ ID NO: 2673703 - RNA, 19 nt, Homo sapiens
  misc_RNA (1)...(19): siRNA sense strand
aggagaaaauuaagcacuu

SEQ ID NO: 2673704 - RNA, 19 nt, Homo sapiens
  misc_RNA (1)...(19): siRNA sense strand
aaaucaaagccaaaggguu

SEQ ID NO: 2673705 - RNA, 19 nt, Homo sapiens
  misc_RNA (1)...(19): siRNA sense strand
agcuaagaagggagcacua

SEQ ID NO: 2673706 - RNA, 19 nt, Homo sapiens
  misc_RNA (1)...(19): siRNA sense strand
uguccaacucugagaacca

SEQ ID NO: 2673707 - RNA, 19 nt, Homo sapiens
  misc_RNA (1)...(19): siRNA sense strand
gggcauugucuguggauau

SEQ ID NO: 2673708 - RNA, 19 nt, Homo sapiens
  misc_RNA (1)...(19): siRNA sense strand
caaagaaaguggaggugga

SEQ ID NO: 2673709 - RNA, 19 nt, Homo sapiens
  misc_RNA (1)...(19): siRNA sense strand
agaaaguggagguggauau

SEQ ID NO: 2673710 - RNA, 19 nt, Homo sapiens
  misc_RNA (1)...(19): siRNA sense strand
uggaagugauggaaggcaa

SEQ ID NO: 2673711 - RNA, 19 nt, Homo sapiens
  misc_RNA (1)...(19): siRNA sense strand
uuggcagaguugagggaaa

SEQ ID NO: 2673712 - RNA, 19 nt, Homo sapiens
  misc_RNA (1)...(19): siRNA sense strand
gaugaugacuccaugggaa

SEQ ID NO: 2673713 - RNA, 19 nt, Homo sapiens
  misc_RNA (1)...(19): siRNA sense strand
cauaguaaggccagagaca

SEQ ID NO: 2673714 - RNA, 19 nt, Homo sapiens
  misc_RNA (1)...(19): siRNA sense strand
gaacugaaccagagggaug

SEQ ID NO: 2673715 - RNA, 19 nt, Homo sapiens
  misc_RNA (1)...(19): siRNA sense strand
gugaaacagcagaugaauu

SEQ ID NO: 2673716 - RNA, 19 nt, Homo sapiens
  misc_RNA (1)...(19): siRNA sense strand
uggucacacaggagggaaa

SEQ ID NO: 2673717 - RNA, 19 nt, Homo sapiens
  misc_RNA (1)...(19): siRNA sense strand
aggacaggguuguguugaa

SEQ ID NO: 2673718 - RNA, 19 nt, Homo sapiens
  misc_RNA (1)...(19): siRNA sense strand
gaaauucacucuugagcca

SEQ ID NO: 2673719 - RNA, 19 nt, Homo sapiens
  misc_RNA (1)...(19): siRNA sense strand
ccaggagaugcuagagaau

SEQ ID NO: 2673720 - RNA, 19 nt, Homo sapiens
  misc_RNA (1)...(19): siRNA sense strand
gaguaggagcuucagcaaa

SEQ ID NO: 2673721 - RNA, 19 nt, Homo sapiens
  misc_RNA (1)...(19): siRNA sense strand
ggaagugauggaaggcaau

SEQ ID NO: 2673722 - RNA, 19 nt, Homo sapiens
  misc_RNA (1)...(19): siRNA sense strand
agaaugaagcugccggaau

SEQ ID NO: 2673723 - RNA, 19 nt, Homo sapiens
  misc_RNA (1)...(19): siRNA sense strand
aaacaaagaaaguggaggu

SEQ ID NO: 2673724 - RNA, 19 nt, Homo sapiens
  misc_RNA (1)...(19): siRNA sense strand
cggagaugcugauguggau

SEQ ID NO: 2673725 - RNA, 19 nt, Homo sapiens
  misc_RNA (1)...(19): siRNA sense strand
guugauaccaaguugaaau

SEQ ID NO: 2673726 - RNA, 19 nt, Homo sapiens
  misc_RNA (1)...(19): siRNA sense strand
caaaggaauggaggagaaa

SEQ ID NO: 2673727 - RNA, 19 nt, Homo sapiens
  misc_RNA (1)...(19): siRNA sense strand
aggagaaagguuugguuga

SEQ ID NO: 2673728 - RNA, 19 nt, Homo sapiens
  misc_RNA (1)...(19): siRNA sense strand
uggcagaguugagggaaaa

SEQ ID NO: 2673729 - RNA, 19 nt, Homo sapiens
  misc_RNA (1)...(19): siRNA sense strand
gagacagugaugaagagaa

SEQ ID NO: 2673730 - RNA, 19 nt, Homo sapiens
  misc_RNA (1)...(19): siRNA sense strand
ugauagaugagcagaacga

SEQ ID NO: 2673731 - RNA, 19 nt, Homo sapiens
  misc_RNA (1)...(19): siRNA sense strand
agaacugcaaacaaagaaa

SEQ ID NO: 2673732 - RNA, 19 nt, Homo sapiens
  misc_RNA (1)...(19): siRNA sense strand
cugccaggaacuugggauu

SEQ ID NO: 2673733 - RNA, 19 nt, Homo sapiens
  misc_RNA (1)...(19): siRNA sense strand
guaugaugauggaacgcau

SEQ ID NO: 2673734 - RNA, 19 nt, Homo sapiens
  misc_RNA (1)...(19): siRNA sense strand
ggcugauagaugagcagaa

SEQ ID NO: 2673735 - RNA, 19 nt, Homo sapiens
  misc_RNA (1)...(19): siRNA sense strand
guuuuaaagaucugggauu

SEQ ID NO: 2673736 - RNA, 19 nt, Homo sapiens
  misc_RNA (1)...(19): siRNA sense strand
acagugaugaagagaauga

SEQ ID NO: 2673737 - RNA, 19 nt, Homo sapiens
  misc_RNA (1)...(19): siRNA sense strand
uugugaaacagcagaugaa

SEQ ID NO: 2673738 - RNA, 19 nt, Homo sapiens
  misc_RNA (1)...(19): siRNA sense strand
uaguaaggccagagacagu

SEQ ID NO: 2673739 - RNA, 19 nt, Homo sapiens
  misc_RNA (1)...(19): siRNA sense strand
gagcugaguccaggagcaa

SEQ ID NO: 2673740 - RNA, 19 nt, Homo sapiens
  misc_RNA (1)...(19): siRNA sense strand
aauuaggagagcagauaga

SEQ ID NO: 2673741 - RNA, 19 nt, Homo sapiens
  misc_RNA (1)...(19): siRNA sense strand
ggcaguaccaggaggacga

SEQ ID NO: 2673742 - RNA, 19 nt, Homo sapiens
  misc_RNA (1)...(19): siRNA sense strand
augaugacuccaugggaau

SEQ ID NO: 2673743 - RNA, 19 nt, Homo sapiens
  misc_RNA (1)...(19): siRNA sense strand
gaugaauucuacagcacca

SEQ ID NO: 2673744 - RNA, 19 nt, Homo sapiens
  misc_RNA (1)...(19): siRNA sense strand
ugccaaggaccaagaguca

SEQ ID NO: 2673745 - RNA, 19 nt, Homo sapiens
  misc_RNA (1)...(19): siRNA sense strand
caggaauaccaaaggaaug

SEQ ID NO: 2673746 - RNA, 19 nt, Homo sapiens
  misc_RNA (1)...(19): siRNA sense strand
guucccagccacaguuaaa

SEQ ID NO: 2673747 - RNA, 19 nt, Homo sapiens
  misc_RNA (1)...(19): siRNA sense strand
acaggaauaccaaaggaau

SEQ ID NO: 2673748 - RNA, 19 nt, Homo sapiens
  misc_RNA (1)...(19): siRNA sense strand
cgucaauaaucuccgggca

SEQ ID NO: 2673749 - RNA, 19 nt, Homo sapiens
  misc_RNA (1)...(19): siRNA sense strand
agagaaugacccagacgau

SEQ ID NO: 2673750 - RNA, 19 nt, Homo sapiens
  misc_RNA (1)...(19): siRNA sense strand
ccacagauaucaaugcacu

SEQ ID NO: 2673751 - RNA, 19 nt, Homo sapiens
  misc_RNA (1)...(19): siRNA sense strand
gucaauaaucuccgggcau

SEQ ID NO: 2673752 - RNA, 19 nt, Homo sapiens
  misc_RNA (1)...(19): siRNA sense strand
uuaaagagccaaaugagga

SEQ ID NO: 2673753 - RNA, 19 nt, Homo sapiens
  misc_RNA (1)...(19): siRNA sense strand
caaaauuaggagagcagau

SEQ ID NO: 2673754 - RNA, 19 nt, Homo sapiens
  misc_RNA (1)...(19): siRNA sense strand
cuaacagagcugccaagaa

SEQ ID NO: 2673755 - RNA, 19 nt, Homo sapiens
  misc_RNA (1)...(19): siRNA sense strand
agacagaacaagaggagaa

SEQ ID NO: 2673756 - RNA, 19 nt, Homo sapiens
  misc_RNA (1)...(19): siRNA sense strand
gcgcauugcaugugggaga

SEQ ID NO: 2673757 - RNA, 19 nt, Homo sapiens
  misc_RNA (1)...(19): siRNA sense strand
ucuuaaacaauguggacaa

SEQ ID NO: 2673758 - RNA, 19 nt, Homo sapiens
  misc_RNA (1)...(19): siRNA sense strand
gcuacagauuggagacaga

SEQ ID NO: 2673759 - RNA, 19 nt, Homo sapiens
  misc_RNA (1)...(19): siRNA sense strand
cagaacaagaggagaacuu

SEQ ID NO: 2673760 - RNA, 19 nt, Homo sapiens
  misc_RNA (1)...(19): siRNA sense strand
cugaagaaugugggagaaa

SEQ ID NO: 2673761 - RNA, 19 nt, Homo sapiens
  misc_RNA (1)...(19): siRNA sense strand
agauaauucagaugagcaa

SEQ ID NO: 2673762 - RNA, 19 nt, Homo sapiens
  misc_RNA (1)...(19): siRNA sense strand
gcaagaaaguuccggagca

SEQ ID NO: 2673763 - RNA, 19 nt, Homo sapiens
  misc_RNA (1)...(19): siRNA sense strand
agaaaguuccggagcaauu

SEQ ID NO: 2673764 - RNA, 19 nt, Homo sapiens
  misc_RNA (1)...(19): siRNA sense strand
aggagaucuugguggcuua

SEQ ID NO: 2673765 - RNA, 19 nt, Homo sapiens
  misc_RNA (1)...(19): siRNA sense strand
caaacaacucggagcaaca

SEQ ID NO: 2673766 - RNA, 19 nt, Homo sapiens
  misc_RNA (1)...(19): siRNA sense strand
uagcagaauccgggaauaa

SEQ ID NO: 2673767 - RNA, 19 nt, Homo sapiens
  misc_RNA (1)...(19): siRNA sense strand
guggguaggaagucaguaa

SEQ ID NO: 2673768 - RNA, 19 nt, Homo sapiens
  misc_RNA (1)...(19): siRNA sense strand
ccguggagcuuaaacgcua

SEQ ID NO: 2673769 - RNA, 19 nt, Homo sapiens
  misc_RNA (1)...(19): siRNA sense strand
ucgucgagcugaugaagaa

SEQ ID NO: 2673770 - RNA, 19 nt, Homo sapiens
  misc_RNA (1)...(19): siRNA sense strand
uggaauaaccauaaguuca

SEQ ID NO: 2673771 - RNA, 19 nt, Homo sapiens
  misc_RNA (1)...(19): siRNA sense strand
ugagagaacuggaggcaac

SEQ ID NO: 2673772 - RNA, 19 nt, Homo sapiens
  misc_RNA (1)...(19): siRNA sense strand
gcucaguguggauggaauu

SEQ ID NO: 2673773 - RNA, 19 nt, Homo sapiens
  misc_RNA (1)...(19): siRNA sense strand
uuuaaaugccguugucaaa

SEQ ID NO: 2673774 - RNA, 19 nt, Homo sapiens
  misc_RNA (1)...(19): siRNA sense strand
caucccaaguaguggaaca

SEQ ID NO: 2673775 - RNA, 19 nt, Homo sapiens
  misc_RNA (1)...(19): siRNA sense strand
ggaacuuggaauaaccaua

SEQ ID NO: 2673776 - RNA, 19 nt, Homo sapiens
  misc_RNA (1)...(19): siRNA sense strand
ccacagucgucgagcugau

SEQ ID NO: 2673777 - RNA, 19 nt, Homo sapiens
  misc_RNA (1)...(19): siRNA sense strand
gaauugauaaggauggcaa

SEQ ID NO: 2673778 - RNA, 19 nt, Homo sapiens
  misc_RNA (1)...(19): siRNA sense strand
gcgcaauccacauaggaga

SEQ ID NO: 2673779 - RNA, 19 nt, Homo sapiens
  misc_RNA (1)...(19): siRNA sense strand
gcugaagaaugugggagaa

SEQ ID NO: 2673780 - RNA, 19 nt, Homo sapiens
  misc_RNA (1)...(19): siRNA sense strand
gaugaggaggagacugaaa

SEQ ID NO: 2673781 - RNA, 19 nt, Homo sapiens
  misc_RNA (1)...(19): siRNA sense strand
caucacaauuucaggaacu

SEQ ID NO: 2673782 - RNA, 19 nt, Homo sapiens
  misc_RNA (1)...(19): siRNA sense strand
gcagauggcuuacuggaga

SEQ ID NO: 2673783 - RNA, 19 nt, Homo sapiens
  misc_RNA (1)...(19): siRNA sense strand
caagaaagggaguguggca

SEQ ID NO: 2673784 - RNA, 19 nt, Homo sapiens
  misc_RNA (1)...(19): siRNA sense strand
acucugacauggaggacuu

SEQ ID NO: 2673785 - RNA, 19 nt, Homo sapiens
  misc_RNA (1)...(19): siRNA sense strand
augcugaagccaugaguau

SEQ ID NO: 2673786 - RNA, 19 nt, Homo sapiens
  misc_RNA (1)...(19): siRNA sense strand
gagcaaggucacacuggaa

SEQ ID NO: 2673787 - RNA, 19 nt, Homo sapiens
  misc_RNA (1)...(19): siRNA sense strand
gcgcuggaggauuuggaaa

SEQ ID NO: 2673788 - RNA, 19 nt, Homo sapiens
  misc_RNA (1)...(19): siRNA sense strand
gagacagagugauggccau

SEQ ID NO: 2673789 - RNA, 19 nt, Homo sapiens
  misc_RNA (1)...(19): siRNA sense strand
ccgauagugcagagacaga

SEQ ID NO: 2673790 - RNA, 19 nt, Homo sapiens
  misc_RNA (1)...(19): siRNA sense strand
cccaaguaguggaacauuu

SEQ ID NO: 2673791 - RNA, 19 nt, Homo sapiens
  misc_RNA (1)...(19): siRNA sense strand
gcugaaagaacuggcgcaa

SEQ ID NO: 2673792 - RNA, 19 nt, Homo sapiens
  misc_RNA (1)...(19): siRNA sense strand
acagauggcaggagagacu

SEQ ID NO: 2673793 - RNA, 19 nt, Homo sapiens
  misc_RNA (1)...(19): siRNA sense strand
uguccgaaccagagacuuu

SEQ ID NO: 2673794 - RNA, 19 nt, Homo sapiens
  misc_RNA (1)...(19): siRNA sense strand
gcaaggucacacuggaaau

SEQ ID NO: 2673795 - RNA, 19 nt, Homo sapiens
  misc_RNA (1)...(19): siRNA sense strand
agagcaucccagaggaauu

SEQ ID NO: 2673796 - RNA, 19 nt, Homo sapiens
  misc_RNA (1)...(19): siRNA sense strand
aggaauugcugcuagaagu

SEQ ID NO: 2673797 - RNA, 19 nt, Homo sapiens
  misc_RNA (1)...(19): siRNA sense strand
cagauggcuuacuggagaa

SEQ ID NO: 2673798 - RNA, 19 nt, Homo sapiens
  misc_RNA (1)...(19): siRNA sense strand
cauuacauaaagaaggcaa

SEQ ID NO: 2673799 - RNA, 19 nt, Homo sapiens
  misc_RNA (1)...(19): siRNA sense strand
augaugaggaggagacuga

SEQ ID NO: 2673800 - RNA, 19 nt, Homo sapiens
  misc_RNA (1)...(19): siRNA sense strand
ggaauaagcuggaccuggu

SEQ ID NO: 2673801 - RNA, 19 nt, Homo sapiens
  misc_RNA (1)...(19): siRNA sense strand
aggaggaauugcugcuaga

SEQ ID NO: 2673802 - RNA, 19 nt, Homo sapiens
  misc_RNA (1)...(19): siRNA sense strand
cuacaucaaagcagugaau

SEQ ID NO: 2673803 - RNA, 19 nt, Homo sapiens
  misc_RNA (1)...(19): siRNA sense strand
gcagcagcuugaaagggaa

SEQ ID NO: 2673804 - RNA, 19 nt, Homo sapiens
  misc_RNA (1)...(19): siRNA sense strand
cuauggaacucaaggcacu

SEQ ID NO: 2673805 - RNA, 19 nt, Homo sapiens
  misc_RNA (1)...(19): siRNA sense strand
cgggaggaauugauaagga

SEQ ID NO: 2673806 - RNA, 19 nt, Homo sapiens
  misc_RNA (1)...(19): siRNA sense strand
acagagagggcacgaucaa

SEQ ID NO: 2673807 - RNA, 19 nt, Homo sapiens
  misc_RNA (1)...(19): siRNA sense strand
ggucacauuacauaaagaa

SEQ ID NO: 2673808 - RNA, 19 nt, Homo sapiens
  misc_RNA (1)...(19): siRNA sense strand
cagauuggagacagaguga

SEQ ID NO: 2673809 - RNA, 19 nt, Homo sapiens
  misc_RNA (1)...(19): siRNA sense strand
cugcaauagacaccagcua

SEQ ID NO: 2673810 - RNA, 19 nt, Homo sapiens
  misc_RNA (1)...(19): siRNA sense strand
aggcaauaccuuugguuuu

SEQ ID NO: 2673811 - RNA, 19 nt, Homo sapiens
  misc_RNA (1)...(19): siRNA sense strand
agccaugaguauucuuaaa

SEQ ID NO: 2673812 - RNA, 19 nt, Homo sapiens
  misc_RNA (1)...(19): siRNA sense strand
caauagcagcagcuugaaa

SEQ ID NO: 2673813 - RNA, 19 nt, Homo sapiens
  misc_RNA (1)...(19): siRNA sense strand
uguuacagauggcaggaga

SEQ ID NO: 2673814 - RNA, 19 nt, Homo sapiens
  misc_RNA (1)...(19): siRNA sense strand
cagaggaauucaagggcuc

SEQ ID NO: 2673815 - RNA, 19 nt, Homo sapiens
  misc_RNA (1)...(19): siRNA sense strand
caucauagcuuuaaaggca

SEQ ID NO: 2673816 - RNA, 19 nt, Homo sapiens
  misc_RNA (1)...(19): siRNA sense strand
uuuaugaagcacugagaaa

SEQ ID NO: 2673817 - RNA, 19 nt, Homo sapiens
  misc_RNA (1)...(19): siRNA sense strand
ucggacagguguaaagauu

SEQ ID NO: 2673818 - RNA, 19 nt, Homo sapiens
  misc_RNA (1)...(19): siRNA sense strand
ccagaucaccaaaggaaaa

SEQ ID NO: 2673819 - RNA, 19 nt, Homo sapiens
  misc_RNA (1)...(19): siRNA sense strand
ggacagguguaaagauuuc

SEQ ID NO: 2673820 - RNA, 19 nt, Homo sapiens
  misc_RNA (1)...(19): siRNA sense strand
uggaagaaacuaugaccau

SEQ ID NO: 2673821 - RNA, 19 nt, Homo sapiens
  misc_RNA (1)...(19): siRNA sense strand
cguuaauccugaaagaagu

SEQ ID NO: 2673822 - RNA, 19 nt, Homo sapiens
  misc_RNA (1)...(19): siRNA sense strand
uugccaagaagcagaagaa

SEQ ID NO: 2673823 - RNA, 19 nt, Homo sapiens
  misc_RNA (1)...(19): siRNA sense strand
uguaguugccuguggugaa

SEQ ID NO: 2673824 - RNA, 19 nt, Homo sapiens
  misc_RNA (1)...(19): siRNA sense strand
agaaugcagcagaguggaa

SEQ ID NO: 2673825 - RNA, 19 nt, Homo sapiens
  misc_RNA (1)...(19): siRNA sense strand
gccagaucaccaaaggaaa

SEQ ID NO: 2673826 - RNA, 19 nt, Homo sapiens
  misc_RNA (1)...(19): siRNA sense strand
acuacaauggggagauaua

SEQ ID NO: 2673827 - RNA, 19 nt, Homo sapiens
  misc_RNA (1)...(19): siRNA sense strand
ugguauaaucgcuuugcua

SEQ ID NO: 2673828 - RNA, 19 nt, Homo sapiens
  misc_RNA (1)...(19): siRNA sense strand
ggagauauacuuaugccau

SEQ ID NO: 2673829 - RNA, 19 nt, Homo sapiens
  misc_RNA (1)...(19): siRNA sense strand
aagcagaagaaggaggaau

SEQ ID NO: 2673830 - RNA, 19 nt, Homo sapiens
  misc_RNA (1)...(19): siRNA sense strand
cuggaguuauguugaugaa

SEQ ID NO: 2673831 - RNA, 19 nt, Homo sapiens
  misc_RNA (1)...(19): siRNA sense strand
gcaauugccaagaagcaga

SEQ ID NO: 2673832 - RNA, 19 nt, Homo sapiens
  misc_RNA (1)...(19): siRNA sense strand
aagcaauugccaagaagca

SEQ ID NO: 2673833 - RNA, 19 nt, Homo sapiens
  misc_RNA (1)...(19): siRNA sense strand
uggugaaagacuggaagaa

SEQ ID NO: 2673834 - RNA, 19 nt, Homo sapiens
  misc_RNA (1)...(19): siRNA sense strand
gaauuaucgaccagaucau

SEQ ID NO: 2673835 - RNA, 19 nt, Homo sapiens
  misc_RNA (1)...(19): siRNA sense strand
cggacagguguaaagauuu

SEQ ID NO: 2673836 - RNA, 19 nt, Homo sapiens
  misc_RNA (1)...(19): siRNA sense strand
ccuugaauguggagcgcuu

SEQ ID NO: 2673837 - RNA, 19 nt, Homo sapiens
  misc_RNA (1)...(19): siRNA sense strand
augauaugggugucaaaua

SEQ ID NO: 2673838 - RNA, 19 nt, Homo sapiens
  misc_RNA (1)...(19): siRNA sense strand
agaugauaugggugucaaa

SEQ ID NO: 2673839 - RNA, 19 nt, Homo sapiens
  misc_RNA (1)...(19): siRNA sense strand
ucaccuaugcccagcgcaa

SEQ ID NO: 2673840 - RNA, 19 nt, Homo sapiens
  misc_RNA (1)...(19): siRNA sense strand
gguacaccauguuggccaa

SEQ ID NO: 2673841 - RNA, 19 nt, Homo sapiens
  misc_RNA (1)...(19): siRNA sense strand
ccgacaaggaggaggaaca

SEQ ID NO: 2673842 - RNA, 19 nt, Homo sapiens
  misc_RNA (1)...(19): siRNA sense strand
ucaaagaacucaaggccau

SEQ ID NO: 2673843 - RNA, 19 nt, Homo sapiens
  misc_RNA (1)...(19): siRNA sense strand
aggaagaagaggaggagga

SEQ ID NO: 2673844 - RNA, 19 nt, Homo sapiens
  misc_RNA (1)...(19): siRNA sense strand
uggaagaggagguggacau

SEQ ID NO: 2673845 - RNA, 19 nt, Homo sapiens
  misc_RNA (1)...(19): siRNA sense strand
ccaagaagcaccugggcau

SEQ ID NO: 2673846 - RNA, 19 nt, Homo sapiens
  misc_RNA (1)...(19): siRNA sense strand
gggaggaggacgagaagga

SEQ ID NO: 2673847 - RNA, 19 nt, Homo sapiens
  misc_RNA (1)...(19): siRNA sense strand
augaagaguccgagcgaga

SEQ ID NO: 2673848 - RNA, 19 nt, Homo sapiens
  misc_RNA (1)...(19): siRNA sense strand
ccagggaagaggaggaaga

SEQ ID NO: 2673849 - RNA, 19 nt, Homo sapiens
  misc_RNA (1)...(19): siRNA sense strand
aagaagaggaggaggagga

SEQ ID NO: 2673850 - RNA, 19 nt, Homo sapiens
  misc_RNA (1)...(19): siRNA sense strand
guuaugaggacgagggcau

SEQ ID NO: 2673851 - RNA, 19 nt, Homo sapiens
  misc_RNA (1)...(19): siRNA sense strand
gggacaagaaggagcggau

SEQ ID NO: 2673852 - RNA, 19 nt, Homo sapiens
  misc_RNA (1)...(19): siRNA sense strand
gggacgagucugagaacga

SEQ ID NO: 2673853 - RNA, 19 nt, Homo sapiens
  misc_RNA (1)...(19): siRNA sense strand
cgguggagucacagaagaa

SEQ ID NO: 2673854 - RNA, 19 nt, Homo sapiens
  misc_RNA (1)...(19): siRNA sense strand
ggguuaacggcauggagaa

SEQ ID NO: 2673855 - RNA, 19 nt, Homo sapiens
  misc_RNA (1)...(19): siRNA sense strand
cgaugaggucacugaggaa

SEQ ID NO: 2673856 - RNA, 19 nt, Homo sapiens
  misc_RNA (1)...(19): siRNA sense strand
gggacaugugcaagaagua

SEQ ID NO: 2673857 - RNA, 19 nt, Homo sapiens
  misc_RNA (1)...(19): siRNA sense strand
gcacuuccgucaugggcaa

SEQ ID NO: 2673858 - RNA, 19 nt, Homo sapiens
  misc_RNA (1)...(19): siRNA sense strand
ugguggaagugguggcuuu

SEQ ID NO: 2673859 - RNA, 19 nt, Homo sapiens
  misc_RNA (1)...(19): siRNA sense strand
ccucauaccucuucagcca

SEQ ID NO: 2673860 - RNA, 19 nt, Homo sapiens
  misc_RNA (1)...(19): siRNA sense strand
cccaugaagcuaagaagaa

SEQ ID NO: 2673861 - RNA, 19 nt, Homo sapiens
  misc_RNA (1)...(19): siRNA sense strand
agaagauggaugagggcca

SEQ ID NO: 2673862 - RNA, 19 nt, Homo sapiens
  misc_RNA (1)...(19): siRNA sense strand
gcaucgaugaggaggacau

SEQ ID NO: 2673863 - RNA, 19 nt, Homo sapiens
  misc_RNA (1)...(19): siRNA sense strand
aggaggaggaggaggaagu

SEQ ID NO: 2673864 - RNA, 19 nt, Homo sapiens
  misc_RNA (1)...(19): siRNA sense strand
cggaugaagaggagacagu

SEQ ID NO: 2673865 - RNA, 19 nt, Homo sapiens
  misc_RNA (1)...(19): siRNA sense strand
ccaucgacaagaaggacaa

SEQ ID NO: 2673866 - RNA, 19 nt, Homo sapiens
  misc_RNA (1)...(19): siRNA sense strand
aggaagaggaggcggagga

SEQ ID NO: 2673867 - RNA, 19 nt, Homo sapiens
  misc_RNA (1)...(19): siRNA sense strand
cagauaaggaugacgacga

SEQ ID NO: 2673868 - RNA, 19 nt, Homo sapiens
  misc_RNA (1)...(19): siRNA sense strand
aagaggaggaggaggagau

SEQ ID NO: 2673869 - RNA, 19 nt, Homo sapiens
  misc_RNA (1)...(19): siRNA sense strand
acguggagcuggacaccaa

SEQ ID NO: 2673870 - RNA, 19 nt, Homo sapiens
  misc_RNA (1)...(19): siRNA sense strand
gcauggaagaggaggugga

SEQ ID NO: 2673871 - RNA, 19 nt, Homo sapiens
  misc_RNA (1)...(19): siRNA sense strand
aggaggaggaggaggagga

SEQ ID NO: 2673872 - RNA, 19 nt, Homo sapiens
  misc_RNA (1)...(19): siRNA sense strand
aagaggagacagugagcau

SEQ ID NO: 2673873 - RNA, 19 nt, Homo sapiens
  misc_RNA (1)...(19): siRNA sense strand
aggaggaagaagaggagga

SEQ ID NO: 2673874 - RNA, 19 nt, Homo sapiens
  misc_RNA (1)...(19): siRNA sense strand
gcucaaguuccggaagaaa

SEQ ID NO: 2673875 - RNA, 19 nt, Homo sapiens
  misc_RNA (1)...(19): siRNA sense strand
augaggucacugaggaaua

SEQ ID NO: 2673876 - RNA, 19 nt, Homo sapiens
  misc_RNA (1)...(19): siRNA sense strand
ggaaaggccugcagcugga

SEQ ID NO: 2673877 - RNA, 19 nt, Homo sapiens
  misc_RNA (1)...(19): siRNA sense strand
agaaggagcggauggccaa

SEQ ID NO: 2673878 - RNA, 19 nt, Homo sapiens
  misc_RNA (1)...(19): siRNA sense strand
cagaauauccgucagguga

SEQ ID NO: 2673879 - RNA, 19 nt, Homo sapiens
  misc_RNA (1)...(19): siRNA sense strand
ccuuggaccugguuggaga

SEQ ID NO: 2673880 - RNA, 19 nt, Homo sapiens
  misc_RNA (1)...(19): siRNA sense strand
uggaugaggaagaugaaga

SEQ ID NO: 2673881 - RNA, 19 nt, Homo sapiens
  misc_RNA (1)...(19): siRNA sense strand
aagaggaggcggaggagga

SEQ ID NO: 2673882 - RNA, 19 nt, Homo sapiens
  misc_RNA (1)...(19): siRNA sense strand
agguggacaucgagacuga

SEQ ID NO: 2673883 - RNA, 19 nt, Homo sapiens
  misc_RNA (1)...(19): siRNA sense strand
gcuucagcagguuggguua

SEQ ID NO: 2673884 - RNA, 19 nt, Homo sapiens
  misc_RNA (1)...(19): siRNA sense strand
gugaaaacuuccugaggga

SEQ ID NO: 2673885 - RNA, 19 nt, Homo sapiens
  misc_RNA (1)...(19): siRNA sense strand
aggaggagaugguggccga

SEQ ID NO: 2673886 - RNA, 19 nt, Homo sapiens
  misc_RNA (1)...(19): siRNA sense strand
cugcugagccucuggccaa

SEQ ID NO: 2673887 - RNA, 19 nt, Homo sapiens
  misc_RNA (1)...(19): siRNA sense strand
gcaccgaggaggaagagga

SEQ ID NO: 2673888 - RNA, 19 nt, Homo sapiens
  misc_RNA (1)...(19): siRNA sense strand
gggagaagcguuaugagga

SEQ ID NO: 2673889 - RNA, 19 nt, Homo sapiens
  misc_RNA (1)...(19): siRNA sense strand
aggaugaggaggagguagu

SEQ ID NO: 2673890 - RNA, 19 nt, Homo sapiens
  misc_RNA (1)...(19): siRNA sense strand
agguggaggagguggagau

SEQ ID NO: 2673891 - RNA, 19 nt, Homo sapiens
  misc_RNA (1)...(19): siRNA sense strand
aguccgagcgagagcgaga

SEQ ID NO: 2673892 - RNA, 19 nt, Homo sapiens
  misc_RNA (1)...(19): siRNA sense strand
agauaaggaugacgacgau

SEQ ID NO: 2673893 - RNA, 19 nt, Homo sapiens
  misc_RNA (1)...(19): siRNA sense strand
ugacauuugccaagcugaa

SEQ ID NO: 2673894 - RNA, 19 nt, Homo sapiens
  misc_RNA (1)...(19): siRNA sense strand
ggagaagcguuaugaggac

SEQ ID NO: 2673895 - RNA, 19 nt, Homo sapiens
  misc_RNA (1)...(19): siRNA sense strand
aggacgagaaggagucauu

SEQ ID NO: 2673896 - RNA, 19 nt, Homo sapiens
  misc_RNA (1)...(19): siRNA sense strand
cuccgaagcaggugacauu

SEQ ID NO: 2673897 - RNA, 19 nt, Homo sapiens
  misc_RNA (1)...(19): siRNA sense strand
caugaagcuaagaagaaga

SEQ ID NO: 2673898 - RNA, 19 nt, Homo sapiens
  misc_RNA (1)...(19): siRNA sense strand
gaaaacuuccugagggaca

SEQ ID NO: 2673899 - RNA, 19 nt, Homo sapiens
  misc_RNA (1)...(19): siRNA sense strand
aggaggaagaggaggcgga

SEQ ID NO: 2673900 - RNA, 19 nt, Homo sapiens
  misc_RNA (1)...(19): siRNA sense strand
cugaggacuuugagcagga

SEQ ID NO: 2673901 - RNA, 19 nt, Homo sapiens
  misc_RNA (1)...(19): siRNA sense strand
gcaagaugguggaaguggu

SEQ ID NO: 2673902 - RNA, 19 nt, Homo sapiens
  misc_RNA (1)...(19): siRNA sense strand
aggacaggccgaagcccaa

SEQ ID NO: 2673903 - RNA, 19 nt, Homo sapiens
  misc_RNA (1)...(19): siRNA sense strand
aauacauggaguuggccaa

SEQ ID NO: 2673904 - RNA, 19 nt, Homo sapiens
  misc_RNA (1)...(19): siRNA sense strand
aucauaaacuguaccgcua

SEQ ID NO: 2673905 - RNA, 19 nt, Homo sapiens
  misc_RNA (1)...(19): siRNA sense strand
aggaagaugaagaguccga

SEQ ID NO: 2673906 - RNA, 19 nt, Homo sapiens
  misc_RNA (1)...(19): siRNA sense strand
aggaaccaccauuggagaa

SEQ ID NO: 2673907 - RNA, 19 nt, Homo sapiens
  misc_RNA (1)...(19): siRNA sense strand
agaaguuacaaguugauga

SEQ ID NO: 2673908 - RNA, 19 nt, Homo sapiens
  misc_RNA (1)...(19): siRNA sense strand
ucaagaucgaugaguucua

SEQ ID NO: 2673909 - RNA, 19 nt, Homo sapiens
  misc_RNA (1)...(19): siRNA sense strand
cugagggacaugugcaaga

SEQ ID NO: 2673910 - RNA, 19 nt, Homo sapiens
  misc_RNA (1)...(19): siRNA sense strand
caggaaaacaaaaggaaaa

SEQ ID NO: 2673911 - RNA, 19 nt, Homo sapiens
  misc_RNA (1)...(19): siRNA sense strand
gcagaaagagagaacgaga

SEQ ID NO: 2673912 - RNA, 19 nt, Homo sapiens
  misc_RNA (1)...(19): siRNA sense strand
aacaaaaggaaaagggaaa

SEQ ID NO: 2673913 - RNA, 19 nt, Homo sapiens
  misc_RNA (1)...(19): siRNA sense strand
agaaaagauuagucagcaa

SEQ ID NO: 2673914 - RNA, 19 nt, Homo sapiens
  misc_RNA (1)...(19): siRNA sense strand
aggcagaaagagagaacga

SEQ ID NO: 2673915 - RNA, 19 nt, Homo sapiens
  misc_RNA (1)...(19): siRNA sense strand
augcauacucucugggcaa

SEQ ID NO: 2673916 - RNA, 19 nt, Homo sapiens
  misc_RNA (1)...(19): siRNA sense strand
ccacuauacaagagagucu

SEQ ID NO: 2673917 - RNA, 19 nt, Homo sapiens
  misc_RNA (1)...(19): siRNA sense strand
auggagagaagaaggagaa

SEQ ID NO: 2673918 - RNA, 19 nt, Homo sapiens
  misc_RNA (1)...(19): siRNA sense strand
uguaaaacgaggaagaaau

SEQ ID NO: 2673919 - RNA, 19 nt, Homo sapiens
  misc_RNA (1)...(19): siRNA sense strand
aaacaaaaggaaaagggaa

SEQ ID NO: 2673920 - RNA, 19 nt, Homo sapiens
  misc_RNA (1)...(19): siRNA sense strand
uggaaauuacagugaagau

SEQ ID NO: 2673921 - RNA, 19 nt, Homo sapiens
  misc_RNA (1)...(19): siRNA sense strand
agaaggagaagcaggcaga

SEQ ID NO: 2673922 - RNA, 19 nt, Homo sapiens
  misc_RNA (1)...(19): siRNA sense strand
cugcaagaugaacaggaaa

SEQ ID NO: 2673923 - RNA, 19 nt, Homo sapiens
  misc_RNA (1)...(19): siRNA sense strand
acgaaaaggagcugcaaga

SEQ ID NO: 2673924 - RNA, 19 nt, Homo sapiens
  misc_RNA (1)...(19): siRNA sense strand
aaggagaagcaggcagaaa

SEQ ID NO: 2673925 - RNA, 19 nt, Homo sapiens
  misc_RNA (1)...(19): siRNA sense strand
acaggaaaacaaaaggaaa

SEQ ID NO: 2673926 - RNA, 19 nt, Homo sapiens
  misc_RNA (1)...(19): siRNA sense strand
gaacaaaauggaaagcaga

SEQ ID NO: 2673927 - RNA, 19 nt, Homo sapiens
  misc_RNA (1)...(19): siRNA sense strand
ugcaagaugaacaggaaaa

SEQ ID NO: 2673928 - RNA, 19 nt, Homo sapiens
  misc_RNA (1)...(19): siRNA sense strand
gggcagaucacgaggucag

SEQ ID NO: 2673929 - RNA, 19 nt, Homo sapiens
  misc_RNA (1)...(19): siRNA sense strand
cagaaacaguaucccgaga

SEQ ID NO: 2673930 - RNA, 19 nt, Homo sapiens
  misc_RNA (1)...(19): siRNA sense strand
aagaugaacaggaaaacaa

SEQ ID NO: 2673931 - RNA, 19 nt, Homo sapiens
  misc_RNA (1)...(19): siRNA sense strand
acaaaaggaaaagggaaaa

SEQ ID NO: 2673932 - RNA, 19 nt, Homo sapiens
  misc_RNA (1)...(19): siRNA sense strand
cagauaagucaaugguuuu

SEQ ID NO: 2673933 - RNA, 19 nt, Homo sapiens
  misc_RNA (1)...(19): siRNA sense strand
aagcaggcagaaagagaga

SEQ ID NO: 2673934 - RNA, 19 nt, Homo sapiens
  misc_RNA (1)...(19): siRNA sense strand
aggaaaagggaaaaugaga

SEQ ID NO: 2673935 - RNA, 19 nt, Homo sapiens
  misc_RNA (1)...(19): siRNA sense strand
ugauaaggcuuguaaucua

SEQ ID NO: 2673936 - RNA, 19 nt, Homo sapiens
  misc_RNA (1)...(19): siRNA sense strand
gugcaaagugauagugaca

SEQ ID NO: 2673937 - RNA, 19 nt, Homo sapiens
  misc_RNA (1)...(19): siRNA sense strand
agauguagcugguaucaua

SEQ ID NO: 2673938 - RNA, 19 nt, Homo sapiens
  misc_RNA (1)...(19): siRNA sense strand
gcauugaucugcugaugaa

SEQ ID NO: 2673939 - RNA, 19 nt, Homo sapiens
  misc_RNA (1)...(19): siRNA sense strand
cugaaagcacggagcgaga

SEQ ID NO: 2673940 - RNA, 19 nt, Homo sapiens
  misc_RNA (1)...(19): siRNA sense strand
ggaucaauggagagcuaau

SEQ ID NO: 2673941 - RNA, 19 nt, Homo sapiens
  misc_RNA (1)...(19): siRNA sense strand
aggcugaaguucuggaguu

SEQ ID NO: 2673942 - RNA, 19 nt, Homo sapiens
  misc_RNA (1)...(19): siRNA sense strand
gggagaaugcaaagcaacu

SEQ ID NO: 2673943 - RNA, 19 nt, Homo sapiens
  misc_RNA (1)...(19): siRNA sense strand
ggccaaauguugugaggag

SEQ ID NO: 2673944 - RNA, 19 nt, Homo sapiens
  misc_RNA (1)...(19): siRNA sense strand
ccaaauguugugaggagga

SEQ ID NO: 2673945 - RNA, 19 nt, Homo sapiens
  misc_RNA (1)...(19): siRNA sense strand
cccaaugguaguaaagaau

SEQ ID NO: 2673946 - RNA, 19 nt, Homo sapiens
  misc_RNA (1)...(19): siRNA sense strand
gugaggaggaacuggacuu

SEQ ID NO: 2673947 - RNA, 19 nt, Homo sapiens
  misc_RNA (1)...(19): siRNA sense strand
ccuugggugcaaagugaua

SEQ ID NO: 2673948 - RNA, 19 nt, Homo sapiens
  misc_RNA (1)...(19): siRNA sense strand
ggcuuguaaucuagaugua

SEQ ID NO: 2673949 - RNA, 19 nt, Homo sapiens
  misc_RNA (1)...(19): siRNA sense strand
guucaacagaugggagaau

SEQ ID NO: 2673950 - RNA, 19 nt, Homo sapiens
  misc_RNA (1)...(19): siRNA sense strand
aaaucaaacuacuggugga

SEQ ID NO: 2673951 - RNA, 19 nt, Homo sapiens
  misc_RNA (1)...(19): siRNA sense strand
gaacuggacuuuagggcug

SEQ ID NO: 2673952 - RNA, 19 nt, Homo sapiens
  misc_RNA (1)...(19): siRNA sense strand
cugugaggccaaugcaaau

SEQ ID NO: 2673953 - RNA, 19 nt, Homo sapiens
  misc_RNA (1)...(19): siRNA sense strand
augagguggugcugacaau

SEQ ID NO: 2673954 - RNA, 19 nt, Homo sapiens
  misc_RNA (1)...(19): siRNA sense strand
guuucaucgccuuugauaa

SEQ ID NO: 2673955 - RNA, 19 nt, Homo sapiens
  misc_RNA (1)...(19): siRNA sense strand
cggcagaagccaagugaca

SEQ ID NO: 2673956 - RNA, 19 nt, Homo sapiens
  misc_RNA (1)...(19): siRNA sense strand
gcuggaaaguggaacggaa

SEQ ID NO: 2673957 - RNA, 19 nt, Homo sapiens
  misc_RNA (1)...(19): siRNA sense strand
gcaauaagcucaagcguuc

SEQ ID NO: 2673958 - RNA, 19 nt, Homo sapiens
  misc_RNA (1)...(19): siRNA sense strand
cuggaaaguggaacggaaa

SEQ ID NO: 2673959 - RNA, 19 nt, Homo sapiens
  misc_RNA (1)...(19): siRNA sense strand
guguuaaaugccagcaaua

SEQ ID NO: 2673960 - RNA, 19 nt, Homo sapiens
  misc_RNA (1)...(19): siRNA sense strand
cuuacagauuugugaaaga

SEQ ID NO: 2673961 - RNA, 19 nt, Homo sapiens
  misc_RNA (1)...(19): siRNA sense strand
gugggagcguggaggacaa

SEQ ID NO: 2673962 - RNA, 19 nt, Homo sapiens
  misc_RNA (1)...(19): siRNA sense strand
cucagaggguggacagaaa

SEQ ID NO: 2673963 - RNA, 19 nt, Homo sapiens
  misc_RNA (1)...(19): siRNA sense strand
gcagaaugggauugguuau

SEQ ID NO: 2673964 - RNA, 19 nt, Homo sapiens
  misc_RNA (1)...(19): siRNA sense strand
cuucagacagccagagcaa

SEQ ID NO: 2673965 - RNA, 19 nt, Homo sapiens
  misc_RNA (1)...(19): siRNA sense strand
ugacagcuuuugugagaaa

SEQ ID NO: 2673966 - RNA, 19 nt, Homo sapiens
  misc_RNA (1)...(19): siRNA sense strand
ccgcagacaggcuggaaga

SEQ ID NO: 2673967 - RNA, 19 nt, Homo sapiens
  misc_RNA (1)...(19): siRNA sense strand
guaaacuggagaagagcuu

SEQ ID NO: 2673968 - RNA, 19 nt, Homo sapiens
  misc_RNA (1)...(19): siRNA sense strand
gagaacaggucacgggaag

SEQ ID NO: 2673969 - RNA, 19 nt, Homo sapiens
  misc_RNA (1)...(19): siRNA sense strand
ggauugguuauguguuaaa

SEQ ID NO: 2673970 - RNA, 19 nt, Homo sapiens
  misc_RNA (1)...(19): siRNA sense strand
uggaauuuggagagagcau

SEQ ID NO: 2673971 - RNA, 19 nt, Homo sapiens
  misc_RNA (1)...(19): siRNA sense strand
ccuacaucaugaagaggau

SEQ ID NO: 2673972 - RNA, 19 nt, Homo sapiens
  misc_RNA (1)...(19): siRNA sense strand
gggccaaagagcaaacuca

SEQ ID NO: 2673973 - RNA, 19 nt, Homo sapiens
  misc_RNA (1)...(19): siRNA sense strand
ggccaaagagcaaacucaa

SEQ ID NO: 2673974 - RNA, 19 nt, Homo sapiens
  misc_RNA (1)...(19): siRNA sense strand
ugucuuuagaugaagcuua

SEQ ID NO: 2673975 - RNA, 19 nt, Homo sapiens
  misc_RNA (1)...(19): siRNA sense strand
ggucagaaccagcagcagu

SEQ ID NO: 2673976 - RNA, 19 nt, Homo sapiens
  misc_RNA (1)...(19): siRNA sense strand
gcccaugagaugauuggaa

SEQ ID NO: 2673977 - RNA, 19 nt, Homo sapiens
  misc_RNA (1)...(19): siRNA sense strand
cgaaacauaagguugacau

SEQ ID NO: 2673978 - RNA, 19 nt, Homo sapiens
  misc_RNA (1)...(19): siRNA sense strand
gguuauguguuaaaugcca

SEQ ID NO: 2673979 - RNA, 19 nt, Homo sapiens
  misc_RNA (1)...(19): siRNA sense strand
ucaugaagaggauggacau

SEQ ID NO: 2673980 - RNA, 19 nt, Homo sapiens
  misc_RNA (1)...(19): siRNA sense strand
cucagaggcagcaggacaa

SEQ ID NO: 2673981 - RNA, 19 nt, Homo sapiens
  misc_RNA (1)...(19): siRNA sense strand
gaagacagcaauaagcuca

SEQ ID NO: 2673982 - RNA, 19 nt, Homo sapiens
  misc_RNA (1)...(19): siRNA sense strand
ggaagaguccuuugggaga

SEQ ID NO: 2673983 - RNA, 19 nt, Homo sapiens
  misc_RNA (1)...(19): siRNA sense strand
gggcacuaauggagggcca

SEQ ID NO: 2673984 - RNA, 19 nt, Homo sapiens
  misc_RNA (1)...(19): siRNA sense strand
cugauuacaaccagacaaa

SEQ ID NO: 2673985 - RNA, 19 nt, Homo sapiens
  misc_RNA (1)...(19): siRNA sense strand
ccugaggaggcucgagaua

SEQ ID NO: 2673986 - RNA, 19 nt, Homo sapiens
  misc_RNA (1)...(19): siRNA sense strand
ggauaaaguuuguugaagc

SEQ ID NO: 2673987 - RNA, 19 nt, Homo sapiens
  misc_RNA (1)...(19): siRNA sense strand
caucguuggaguugggaau

SEQ ID NO: 2673988 - RNA, 19 nt, Homo sapiens
  misc_RNA (1)...(19): siRNA sense strand
ccgugucacaugaaagaaa

SEQ ID NO: 2673989 - RNA, 19 nt, Homo sapiens
  misc_RNA (1)...(19): siRNA sense strand
uggaauuggcugaugugaa

SEQ ID NO: 2673990 - RNA, 19 nt, Homo sapiens
  misc_RNA (1)...(19): siRNA sense strand
ccuguuuggcuuuggaaau

SEQ ID NO: 2673991 - RNA, 19 nt, Homo sapiens
  misc_RNA (1)...(19): siRNA sense strand
cgauaucauccuaggaacu

SEQ ID NO: 2673992 - RNA, 19 nt, Homo sapiens
  misc_RNA (1)...(19): siRNA sense strand
agacgguguucgagaccuu

SEQ ID NO: 2673993 - RNA, 19 nt, Homo sapiens
  misc_RNA (1)...(19): siRNA sense strand
gggcaaaaucugacaccuu

SEQ ID NO: 2673994 - RNA, 19 nt, Homo sapiens
  misc_RNA (1)...(19): siRNA sense strand
ucucaagaccagcugcuaa

SEQ ID NO: 2673995 - RNA, 19 nt, Homo sapiens
  misc_RNA (1)...(19): siRNA sense strand
uggcugaugugaauggaga

SEQ ID NO: 2673996 - RNA, 19 nt, Homo sapiens
  misc_RNA (1)...(19): siRNA sense strand
agggaaagccauuuggacu

SEQ ID NO: 2673997 - RNA, 19 nt, Homo sapiens
  misc_RNA (1)...(19): siRNA sense strand
uagaagagccagaauggga

SEQ ID NO: 2673998 - RNA, 19 nt, Homo sapiens
  misc_RNA (1)...(19): siRNA sense strand
cagaaaugucccugacugu

SEQ ID NO: 2673999 - RNA, 19 nt, Homo sapiens
  misc_RNA (1)...(19): siRNA sense strand
cgaauuucuuaauggccuu

SEQ ID NO: 2674000 - RNA, 19 nt, Homo sapiens
  misc_RNA (1)...(19): siRNA sense strand
agaagagccagaaugggaa

SEQ ID NO: 2674001 - RNA, 19 nt, Homo sapiens
  misc_RNA (1)...(19): siRNA sense strand
aauuaacgaccucuggaaa

SEQ ID NO: 2674002 - RNA, 19 nt, Homo sapiens
  misc_RNA (1)...(19): siRNA sense strand
gcuucagagguuggaauua

SEQ ID NO: 2674003 - RNA, 19 nt, Homo sapiens
  misc_RNA (1)...(19): siRNA sense strand
acguuuaugaacacggaaa

SEQ ID NO: 2674004 - RNA, 19 nt, Homo sapiens
  misc_RNA (1)...(19): siRNA sense strand
gggauauacugcagccuac

SEQ ID NO: 2674005 - RNA, 19 nt, Homo sapiens
  misc_RNA (1)...(19): siRNA sense strand
aagaaacccaagauggaga

SEQ ID NO: 2674006 - RNA, 19 nt, Homo sapiens
  misc_RNA (1)...(19): siRNA sense strand
ccugugaguguaagggaaa

SEQ ID NO: 2674007 - RNA, 19 nt, Homo sapiens
  misc_RNA (1)...(19): siRNA sense strand
gcccaauaaagcagaaaca

SEQ ID NO: 2674008 - RNA, 19 nt, Homo sapiens
  misc_RNA (1)...(19): siRNA sense strand
uggacgaggacgaggagau

SEQ ID NO: 2674009 - RNA, 19 nt, Homo sapiens
  misc_RNA (1)...(19): siRNA sense strand
aggacgaggagauggauga

SEQ ID NO: 2674010 - RNA, 19 nt, Homo sapiens
  misc_RNA (1)...(19): siRNA sense strand
agauggugucuguggaaga

SEQ ID NO: 2674011 - RNA, 19 nt, Homo sapiens
  misc_RNA (1)...(19): siRNA sense strand
gccugugaguguaagggaa

SEQ ID NO: 2674012 - RNA, 19 nt, Homo sapiens
  misc_RNA (1)...(19): siRNA sense strand
acuucaaacuuguggcugu

SEQ ID NO: 2674013 - RNA, 19 nt, Homo sapiens
  misc_RNA (1)...(19): siRNA sense strand
cucaauaacugccuggaga

SEQ ID NO: 2674014 - RNA, 19 nt, Homo sapiens
  misc_RNA (1)...(19): siRNA sense strand
aagcagaggcugagggagg

SEQ ID NO: 2674015 - RNA, 19 nt, Homo sapiens
  misc_RNA (1)...(19): siRNA sense strand
agaaauuagaggagauuca

SEQ ID NO: 2674016 - RNA, 19 nt, Homo sapiens
  misc_RNA (1)...(19): siRNA sense strand
ccuuacaugcauuaggaaa

SEQ ID NO: 2674017 - RNA, 19 nt, Homo sapiens
  misc_RNA (1)...(19): siRNA sense strand
gcgaagaaauuagaggaga

SEQ ID NO: 2674018 - RNA, 19 nt, Homo sapiens
  misc_RNA (1)...(19): siRNA sense strand
ggaccuugugcgaagaaau

SEQ ID NO: 2674019 - RNA, 19 nt, Homo sapiens
  misc_RNA (1)...(19): siRNA sense strand
cuuacaugcauuaggaaaa

SEQ ID NO: 2674020 - RNA, 19 nt, Homo sapiens
  misc_RNA (1)...(19): siRNA sense strand
ccgagaaguguuggagcaa

SEQ ID NO: 2674021 - RNA, 19 nt, Homo sapiens
  misc_RNA (1)...(19): siRNA sense strand
gggacagauaacagauuca

SEQ ID NO: 2674022 - RNA, 19 nt, Homo sapiens
  misc_RNA (1)...(19): siRNA sense strand
cugcuaaagaucaucgauu

SEQ ID NO: 2674023 - RNA, 19 nt, Homo sapiens
  misc_RNA (1)...(19): siRNA sense strand
cccgagaaguguuggagca

SEQ ID NO: 2674024 - RNA, 19 nt, Homo sapiens
  misc_RNA (1)...(19): siRNA sense strand
uaaugaguaugcagggaca

SEQ ID NO: 2674025 - RNA, 19 nt, Homo sapiens
  misc_RNA (1)...(19): siRNA sense strand
cugcaaucucacugacgaa

SEQ ID NO: 2674026 - RNA, 19 nt, Homo sapiens
  misc_RNA (1)...(19): siRNA sense strand
cccaaacaaacuaaagcaa

SEQ ID NO: 2674027 - RNA, 19 nt, Homo sapiens
  misc_RNA (1)...(19): siRNA sense strand
cagauaucucacagacauu

SEQ ID NO: 2674028 - RNA, 19 nt, Homo sapiens
  misc_RNA (1)...(19): siRNA sense strand
ucuacggagcugcgauaua

SEQ ID NO: 2674029 - RNA, 19 nt, Homo sapiens
  misc_RNA (1)...(19): siRNA sense strand
aggagauucauaugggaca

SEQ ID NO: 2674030 - RNA, 19 nt, Homo sapiens
  misc_RNA (1)...(19): siRNA sense strand
ccuccaaggugaaggccaa

SEQ ID NO: 2674031 - RNA, 19 nt, Homo sapiens
  misc_RNA (1)...(19): siRNA sense strand
agagggagcuggaggccaa

SEQ ID NO: 2674032 - RNA, 19 nt, Homo sapiens
  misc_RNA (1)...(19): siRNA sense strand
agaucaagcuggaggccca

SEQ ID NO: 2674033 - RNA, 19 nt, Homo sapiens
  misc_RNA (1)...(19): siRNA sense strand
ugaaugcacuggaggguga

SEQ ID NO: 2674034 - RNA, 19 nt, Homo sapiens
  misc_RNA (1)...(19): siRNA sense strand
agaagacgcuggaggcuga

SEQ ID NO: 2674035 - RNA, 19 nt, Homo sapiens
  misc_RNA (1)...(19): siRNA sense strand
agggugagcuggaggagca

SEQ ID NO: 2674036 - RNA, 19 nt, Homo sapiens
  misc_RNA (1)...(19): siRNA sense strand
cagauugaggacagagaca

SEQ ID NO: 2674037 - RNA, 19 nt, Homo sapiens
  misc_RNA (1)...(19): siRNA sense strand
cagcggaagcagaagcaga

SEQ ID NO: 2674038 - RNA, 19 nt, Homo sapiens
  misc_RNA (1)...(19): siRNA sense strand
cggaagaugaggagccgga

SEQ ID NO: 2674039 - RNA, 19 nt, Homo sapiens
  misc_RNA (1)...(19): siRNA sense strand
cugaacuggagaagaucaa

SEQ ID NO: 2674040 - RNA, 19 nt, Homo sapiens
  misc_RNA (1)...(19): siRNA sense strand
cuggagaggagguggccau

SEQ ID NO: 2674041 - RNA, 19 nt, Homo sapiens
  misc_RNA (1)...(19): siRNA sense strand
gcuugaagagagaggugga

SEQ ID NO: 2674042 - RNA, 19 nt, Homo sapiens
  misc_RNA (1)...(19): siRNA sense strand
uugagagcuugaagagaga

SEQ ID NO: 2674043 - RNA, 19 nt, Homo sapiens
  misc_RNA (1)...(19): siRNA sense strand
uggagaagaucaagcugga

SEQ ID NO: 2674044 - RNA, 19 nt, Homo sapiens
  misc_RNA (1)...(19): siRNA sense strand
cagcaacauccgggagauu

SEQ ID NO: 2674045 - RNA, 19 nt, Homo sapiens
  misc_RNA (1)...(19): siRNA sense strand
augaggagccggagaaucu

SEQ ID NO: 2674046 - RNA, 19 nt, Homo sapiens
  misc_RNA (1)...(19): siRNA sense strand
agcuagaggagaagagcga

SEQ ID NO: 2674047 - RNA, 19 nt, Homo sapiens
  misc_RNA (1)...(19): siRNA sense strand
ugcaggaugccgugagcaa

SEQ ID NO: 2674048 - RNA, 19 nt, Homo sapiens
  misc_RNA (1)...(19): siRNA sense strand
agaaggagaucguggagag

SEQ ID NO: 2674049 - RNA, 19 nt, Homo sapiens
  misc_RNA (1)...(19): siRNA sense strand
gccaagaacucgcgcugga

SEQ ID NO: 2674050 - RNA, 19 nt, Homo sapiens
  misc_RNA (1)...(19): siRNA sense strand
gguacaucgcgcagcugaa

SEQ ID NO: 2674051 - RNA, 19 nt, Homo sapiens
  misc_RNA (1)...(19): siRNA sense strand
gcuacggacagcuggugaa

SEQ ID NO: 2674052 - RNA, 19 nt, Homo sapiens
  misc_RNA (1)...(19): siRNA sense strand
cagacuaccuggugagcag

SEQ ID NO: 2674053 - RNA, 19 nt, Homo sapiens
  misc_RNA (1)...(19): siRNA sense strand
gaagaugaggagccggaga

SEQ ID NO: 2674054 - RNA, 19 nt, Homo sapiens
  misc_RNA (1)...(19): siRNA sense strand
gccaggaacugaaacccaa

SEQ ID NO: 2674055 - RNA, 19 nt, Homo sapiens
  misc_RNA (1)...(19): siRNA sense strand
uggaggugaacgagaggau

SEQ ID NO: 2674056 - RNA, 19 nt, Homo sapiens
  misc_RNA (1)...(19): siRNA sense strand
gcaggaauguucucgcaca

SEQ ID NO: 2674057 - RNA, 19 nt, Homo sapiens
  misc_RNA (1)...(19): siRNA sense strand
ggucaaagcagaaggccaa

SEQ ID NO: 2674058 - RNA, 19 nt, Homo sapiens
  misc_RNA (1)...(19): siRNA sense strand
augcaaggcagaugagaaa

SEQ ID NO: 2674059 - RNA, 19 nt, Homo sapiens
  misc_RNA (1)...(19): siRNA sense strand
agaugaagccccagagaaa

SEQ ID NO: 2674060 - RNA, 19 nt, Homo sapiens
  misc_RNA (1)...(19): siRNA sense strand
ggaggaaggccgaaggcuu

SEQ ID NO: 2674061 - RNA, 19 nt, Homo sapiens
  misc_RNA (1)...(19): siRNA sense strand
uugccaaagcagaggagaa

SEQ ID NO: 2674062 - RNA, 19 nt, Homo sapiens
  misc_RNA (1)...(19): siRNA sense strand
augccagaauugagaggaa

SEQ ID NO: 2674063 - RNA, 19 nt, Homo sapiens
  misc_RNA (1)...(19): siRNA sense strand
cugaagaagaauuugagaa

SEQ ID NO: 2674064 - RNA, 19 nt, Homo sapiens
  misc_RNA (1)...(19): siRNA sense strand
uggaagagucauacaucaa

SEQ ID NO: 2674065 - RNA, 19 nt, Homo sapiens
  misc_RNA (1)...(19): siRNA sense strand
ugagaagagaagagaaguu

SEQ ID NO: 2674066 - RNA, 19 nt, Homo sapiens
  misc_RNA (1)...(19): siRNA sense strand
agagaaaagcagaggcaga

SEQ ID NO: 2674067 - RNA, 19 nt, Homo sapiens
  misc_RNA (1)...(19): siRNA sense strand
aggcaaaauaacugaagaa

SEQ ID NO: 2674068 - RNA, 19 nt, Homo sapiens
  misc_RNA (1)...(19): siRNA sense strand
ggaaaagggaagaggguuc

SEQ ID NO: 2674069 - RNA, 19 nt, Homo sapiens
  misc_RNA (1)...(19): siRNA sense strand
gagaaaaggaaaagggaag

SEQ ID NO: 2674070 - RNA, 19 nt, Homo sapiens
  misc_RNA (1)...(19): siRNA sense strand
agaagagaagagaaguuaa

SEQ ID NO: 2674071 - RNA, 19 nt, Homo sapiens
  misc_RNA (1)...(19): siRNA sense strand
agacgcaggaaguggagaa

SEQ ID NO: 2674072 - RNA, 19 nt, Homo sapiens
  misc_RNA (1)...(19): siRNA sense strand
aaaugaagggagaagaaaa

SEQ ID NO: 2674073 - RNA, 19 nt, Homo sapiens
  misc_RNA (1)...(19): siRNA sense strand
auauugaagaugaggacau

SEQ ID NO: 2674074 - RNA, 19 nt, Homo sapiens
  misc_RNA (1)...(19): siRNA sense strand
acaaagaugucgcugcaga

SEQ ID NO: 2674075 - RNA, 19 nt, Homo sapiens
  misc_RNA (1)...(19): siRNA sense strand
uggugaagggcgugaagau

SEQ ID NO: 2674076 - RNA, 19 nt, Homo sapiens
  misc_RNA (1)...(19): siRNA sense strand
aaacaaagaugucgcugca

SEQ ID NO: 2674077 - RNA, 19 nt, Homo sapiens
  misc_RNA (1)...(19): siRNA sense strand
ccugaagucaacuggguuu

SEQ ID NO: 2674078 - RNA, 19 nt, Homo sapiens
  misc_RNA (1)...(19): siRNA sense strand
agaagagagaaaacagaaa

SEQ ID NO: 2674079 - RNA, 19 nt, Homo sapiens
  misc_RNA (1)...(19): siRNA sense strand
aggagaaacaccuggucuu

SEQ ID NO: 2674080 - RNA, 19 nt, Homo sapiens
  misc_RNA (1)...(19): siRNA sense strand
guguggaauacuaugggaa

SEQ ID NO: 2674081 - RNA, 19 nt, Homo sapiens
  misc_RNA (1)...(19): siRNA sense strand
acuacuacaugguaugcaa

SEQ ID NO: 2674082 - RNA, 19 nt, Homo sapiens
  misc_RNA (1)...(19): siRNA sense strand
aauaagaucuucauggagu

SEQ ID NO: 2674083 - RNA, 19 nt, Homo sapiens
  misc_RNA (1)...(19): siRNA sense strand
agggaagaggguucugaua

SEQ ID NO: 2674084 - RNA, 19 nt, Homo sapiens
  misc_RNA (1)...(19): siRNA sense strand
aagaauuugagaagggcuu

SEQ ID NO: 2674085 - RNA, 19 nt, Homo sapiens
  misc_RNA (1)...(19): siRNA sense strand
cguuaauaccgacacgauu

SEQ ID NO: 2674086 - RNA, 19 nt, Homo sapiens
  misc_RNA (1)...(19): siRNA sense strand
caaaagaacaaucaagaca

SEQ ID NO: 2674087 - RNA, 19 nt, Homo sapiens
  misc_RNA (1)...(19): siRNA sense strand
agacaguggauuuagggau

SEQ ID NO: 2674088 - RNA, 19 nt, Homo sapiens
  misc_RNA (1)...(19): siRNA sense strand
gcagaggagaacaggccuu

SEQ ID NO: 2674089 - RNA, 19 nt, Homo sapiens
  misc_RNA (1)...(19): siRNA sense strand
cgcaggaaguggagaaccu

SEQ ID NO: 2674090 - RNA, 19 nt, Homo sapiens
  misc_RNA (1)...(19): siRNA sense strand
cagccuugcucgagguuuu

SEQ ID NO: 2674091 - RNA, 19 nt, Homo sapiens
  misc_RNA (1)...(19): siRNA sense strand
cagugaaggagaagggcgu

SEQ ID NO: 2674092 - RNA, 19 nt, Homo sapiens
  misc_RNA (1)...(19): siRNA sense strand
ugagaaaaggaaaagggaa

SEQ ID NO: 2674093 - RNA, 19 nt, Homo sapiens
  misc_RNA (1)...(19): siRNA sense strand
uugagagguuuaagcaaca

SEQ ID NO: 2674094 - RNA, 19 nt, Homo sapiens
  misc_RNA (1)...(19): siRNA sense strand
uaugcaaggcagaugagaa

SEQ ID NO: 2674095 - RNA, 19 nt, Homo sapiens
  misc_RNA (1)...(19): siRNA sense strand
ggacaugggguuugaggca

SEQ ID NO: 2674096 - RNA, 19 nt, Homo sapiens
  misc_RNA (1)...(19): siRNA sense strand
ugccagaauugagaggaaa

SEQ ID NO: 2674097 - RNA, 19 nt, Homo sapiens
  misc_RNA (1)...(19): siRNA sense strand
aaugaagggagaagaaaau

SEQ ID NO: 2674098 - RNA, 19 nt, Homo sapiens
  misc_RNA (1)...(19): siRNA sense strand
uggucaaagcagaaggcca

SEQ ID NO: 2674099 - RNA, 19 nt, Homo sapiens
  misc_RNA (1)...(19): siRNA sense strand
ggguuugaggcaagcauca

SEQ ID NO: 2674100 - RNA, 19 nt, Homo sapiens
  misc_RNA (1)...(19): siRNA sense strand
ugguguuggaugaggcaga

SEQ ID NO: 2674101 - RNA, 19 nt, Homo sapiens
  misc_RNA (1)...(19): siRNA sense strand
uggaugaggcagacagacu

SEQ ID NO: 2674102 - RNA, 19 nt, Homo sapiens
  misc_RNA (1)...(19): siRNA sense strand
ggguucugauauugaagau

SEQ ID NO: 2674103 - RNA, 19 nt, Homo sapiens
  misc_RNA (1)...(19): siRNA sense strand
agauagaggagcagaacaa

SEQ ID NO: 2674104 - RNA, 19 nt, Homo sapiens
  misc_RNA (1)...(19): siRNA sense strand
gagacaaggaaguggacua

SEQ ID NO: 2674105 - RNA, 19 nt, Homo sapiens
  misc_RNA (1)...(19): siRNA sense strand
ggagaaaagcaaaagaaaa

SEQ ID NO: 2674106 - RNA, 19 nt, Homo sapiens
  misc_RNA (1)...(19): siRNA sense strand
gaaaagaggagaagaacaa

SEQ ID NO: 2674107 - RNA, 19 nt, Homo sapiens
  misc_RNA (1)...(19): siRNA sense strand
ucaacuggaucaagagaaa

SEQ ID NO: 2674108 - RNA, 19 nt, Homo sapiens
  misc_RNA (1)...(19): siRNA sense strand
gagaaaacucaguguaaua

SEQ ID NO: 2674109 - RNA, 19 nt, Homo sapiens
  misc_RNA (1)...(19): siRNA sense strand
aggaagaagccgagaucau

SEQ ID NO: 2674110 - RNA, 19 nt, Homo sapiens
  misc_RNA (1)...(19): siRNA sense strand
agaacaagcagaagggaga

SEQ ID NO: 2674111 - RNA, 19 nt, Homo sapiens
  misc_RNA (1)...(19): siRNA sense strand
gcugauugccgcagacaaa

SEQ ID NO: 2674112 - RNA, 19 nt, Homo sapiens
  misc_RNA (1)...(19): siRNA sense strand
uaacaaugggagagaagua

SEQ ID NO: 2674113 - RNA, 19 nt, Homo sapiens
  misc_RNA (1)...(19): siRNA sense strand
gaagaaacuggcagaggaa

SEQ ID NO: 2674114 - RNA, 19 nt, Homo sapiens
  misc_RNA (1)...(19): siRNA sense strand
agagaaaagaggagaagaa

SEQ ID NO: 2674115 - RNA, 19 nt, Homo sapiens
  misc_RNA (1)...(19): siRNA sense strand
ggcaguacuucgugaacaa

SEQ ID NO: 2674116 - RNA, 19 nt, Homo sapiens
  misc_RNA (1)...(19): siRNA sense strand
gggaagaccugaagagccu

SEQ ID NO: 2674117 - RNA, 19 nt, Homo sapiens
  misc_RNA (1)...(19): siRNA sense strand
ggaaaaggccauggagaua

SEQ ID NO: 2674118 - RNA, 19 nt, Homo sapiens
  misc_RNA (1)...(19): siRNA sense strand
cuacagaaauugaggcgca

SEQ ID NO: 2674119 - RNA, 19 nt, Homo sapiens
  misc_RNA (1)...(19): siRNA sense strand
caaaauugcuggaugagaa

SEQ ID NO: 2674120 - RNA, 19 nt, Homo sapiens
  misc_RNA (1)...(19): siRNA sense strand
ccauggagauagaggagca

SEQ ID NO: 2674121 - RNA, 19 nt, Homo sapiens
  misc_RNA (1)...(19): siRNA sense strand
guaauauagcucagugcaa

SEQ ID NO: 2674122 - RNA, 19 nt, Homo sapiens
  misc_RNA (1)...(19): siRNA sense strand
ccgcuguagccgaggagaa

SEQ ID NO: 2674123 - RNA, 19 nt, Homo sapiens
  misc_RNA (1)...(19): siRNA sense strand
agaaacuggcagaggaaaa

SEQ ID NO: 2674124 - RNA, 19 nt, Homo sapiens
  misc_RNA (1)...(19): siRNA sense strand
cggcagaaaauauagaaaa

SEQ ID NO: 2674125 - RNA, 19 nt, Homo sapiens
  misc_RNA (1)...(19): siRNA sense strand
gagucagauuggacaggaa

SEQ ID NO: 2674126 - RNA, 19 nt, Homo sapiens
  misc_RNA (1)...(19): siRNA sense strand
cugaggaccuggugcagaa

SEQ ID NO: 2674127 - RNA, 19 nt, Homo sapiens
  misc_RNA (1)...(19): siRNA sense strand
ucagagaaaucaagcccaa

SEQ ID NO: 2674128 - RNA, 19 nt, Homo sapiens
  misc_RNA (1)...(19): siRNA sense strand
augaaacgccugaggaaca

SEQ ID NO: 2674129 - RNA, 19 nt, Homo sapiens
  misc_RNA (1)...(19): siRNA sense strand
ugcaaugggucaaggucaa

SEQ ID NO: 2674130 - RNA, 19 nt, Homo sapiens
  misc_RNA (1)...(19): siRNA sense strand
cagaaugaguuggcagcaa

SEQ ID NO: 2674131 - RNA, 19 nt, Homo sapiens
  misc_RNA (1)...(19): siRNA sense strand
ucaugaaacgccugaggaa

SEQ ID NO: 2674132 - RNA, 19 nt, Homo sapiens
  misc_RNA (1)...(19): siRNA sense strand
ccuucaagccgcuggucua

SEQ ID NO: 2674133 - RNA, 19 nt, Homo sapiens
  misc_RNA (1)...(19): siRNA sense strand
gagaccaaauccaaggcaa

SEQ ID NO: 2674134 - RNA, 19 nt, Homo sapiens
  misc_RNA (1)...(19): siRNA sense strand
ggcugaaagaucuggagaa

SEQ ID NO: 2674135 - RNA, 19 nt, Homo sapiens
  misc_RNA (1)...(19): siRNA sense strand
aggccuugcuggaggagau

SEQ ID NO: 2674136 - RNA, 19 nt, Homo sapiens
  misc_RNA (1)...(19): siRNA sense strand
uggagauagaggagcagaa

SEQ ID NO: 2674137 - RNA, 19 nt, Homo sapiens
  misc_RNA (1)...(19): siRNA sense strand
agaaggaaguuugggaaga

SEQ ID NO: 2674138 - RNA, 19 nt, Homo sapiens
  misc_RNA (1)...(19): siRNA sense strand
agaagaagaaacuggcaga

SEQ ID NO: 2674139 - RNA, 19 nt, Homo sapiens
  misc_RNA (1)...(19): siRNA sense strand
aggaaaaggccauggagau

SEQ ID NO: 2674140 - RNA, 19 nt, Homo sapiens
  misc_RNA (1)...(19): siRNA sense strand
uggcagcaauucagaaaga

SEQ ID NO: 2674141 - RNA, 19 nt, Homo sapiens
  misc_RNA (1)...(19): siRNA sense strand
agaacaaagcgaugaucuu

SEQ ID NO: 2674142 - RNA, 19 nt, Homo sapiens
  misc_RNA (1)...(19): siRNA sense strand
agaagaaacuggcagagga

SEQ ID NO: 2674143 - RNA, 19 nt, Homo sapiens
  misc_RNA (1)...(19): siRNA sense strand
cugaagaaauggaagcugu

SEQ ID NO: 2674144 - RNA, 19 nt, Homo sapiens
  misc_RNA (1)...(19): siRNA sense strand
cagcuagagauguccauaa

SEQ ID NO: 2674145 - RNA, 19 nt, Homo sapiens
  misc_RNA (1)...(19): siRNA sense strand
ugagcgugcugguggcuua

SEQ ID NO: 2674146 - RNA, 19 nt, Homo sapiens
  misc_RNA (1)...(19): siRNA sense strand
agaucgugcuggcggagaa

SEQ ID NO: 2674147 - RNA, 19 nt, Homo sapiens
  misc_RNA (1)...(19): siRNA sense strand
uagccgaggagaagaagaa

SEQ ID NO: 2674148 - RNA, 19 nt, Homo sapiens
  misc_RNA (1)...(19): siRNA sense strand
gaacaaaagugcaaauaac

SEQ ID NO: 2674149 - RNA, 19 nt, Homo sapiens
  misc_RNA (1)...(19): siRNA sense strand
gaacaaagucauugccaug

SEQ ID NO: 2674150 - RNA, 19 nt, Homo sapiens
  misc_RNA (1)...(19): siRNA sense strand
agaaugaguuggcagcaau

SEQ ID NO: 2674151 - RNA, 19 nt, Homo sapiens
  misc_RNA (1)...(19): siRNA sense strand
agaacaagaaccugcucaa

SEQ ID NO: 2674152 - RNA, 19 nt, Homo sapiens
  misc_RNA (1)...(19): siRNA sense strand
auucaaaauugcuggauga

SEQ ID NO: 2674153 - RNA, 19 nt, Homo sapiens
  misc_RNA (1)...(19): siRNA sense strand
ugaaauuagcagagcgaag

SEQ ID NO: 2674154 - RNA, 19 nt, Homo sapiens
  misc_RNA (1)...(19): siRNA sense strand
cuauuugaaacuugggauu

SEQ ID NO: 2674155 - RNA, 19 nt, Homo sapiens
  misc_RNA (1)...(19): siRNA sense strand
auucagaaagagcuggaaa

SEQ ID NO: 2674156 - RNA, 19 nt, Homo sapiens
  misc_RNA (1)...(19): siRNA sense strand
gcgaagugguuuuggagga

SEQ ID NO: 2674157 - RNA, 19 nt, Homo sapiens
  misc_RNA (1)...(19): siRNA sense strand
gugcaggagagaaggaagu

SEQ ID NO: 2674158 - RNA, 19 nt, Homo sapiens
  misc_RNA (1)...(19): siRNA sense strand
ccaaugaucccggcagaaa

SEQ ID NO: 2674159 - RNA, 19 nt, Homo sapiens
  misc_RNA (1)...(19): siRNA sense strand
gauucaaauuucagacugu

SEQ ID NO: 2674160 - RNA, 19 nt, Homo sapiens
  misc_RNA (1)...(19): siRNA sense strand
uggaaauucugaacacgua

SEQ ID NO: 2674161 - RNA, 19 nt, Homo sapiens
  misc_RNA (1)...(19): siRNA sense strand
ucaaguaccuaauuggaga

SEQ ID NO: 2674162 - RNA, 19 nt, Homo sapiens
  misc_RNA (1)...(19): siRNA sense strand
uagaaaauguggugaagca

SEQ ID NO: 2674163 - RNA, 19 nt, Homo sapiens
  misc_RNA (1)...(19): siRNA sense strand
ggagagucccucaagaaga

SEQ ID NO: 2674164 - RNA, 19 nt, Homo sapiens
  misc_RNA (1)...(19): siRNA sense strand
agagaaggaaguuugggaa

SEQ ID NO: 2674165 - RNA, 19 nt, Homo sapiens
  misc_RNA (1)...(19): siRNA sense strand
ccgaggagaagaagaaacu

SEQ ID NO: 2674166 - RNA, 19 nt, Homo sapiens
  misc_RNA (1)...(19): siRNA sense strand
gcugaaauuuguugaagcu

SEQ ID NO: 2674167 - RNA, 19 nt, Homo sapiens
  misc_RNA (1)...(19): siRNA sense strand
agcuagagauguccauaaa

SEQ ID NO: 2674168 - RNA, 19 nt, Homo sapiens
  misc_RNA (1)...(19): siRNA sense strand
uggagaaaagcaaaagaaa

SEQ ID NO: 2674169 - RNA, 19 nt, Homo sapiens
  misc_RNA (1)...(19): siRNA sense strand
gggucaaggucaagaaaag

SEQ ID NO: 2674170 - RNA, 19 nt, Homo sapiens
  misc_RNA (1)...(19): siRNA sense strand
agaagucccuggagaggau

SEQ ID NO: 2674171 - RNA, 19 nt, Homo sapiens
  misc_RNA (1)...(19): siRNA sense strand
uggacgagcugaaccagaa

SEQ ID NO: 2674172 - RNA, 19 nt, Homo sapiens
  misc_RNA (1)...(19): siRNA sense strand
agaacaaagucauugccau

SEQ ID NO: 2674173 - RNA, 19 nt, Homo sapiens
  misc_RNA (1)...(19): siRNA sense strand
aacucaagcuggcggagaa

SEQ ID NO: 2674174 - RNA, 19 nt, Homo sapiens
  misc_RNA (1)...(19): siRNA sense strand
gcugaaagaucuggagaag

SEQ ID NO: 2674175 - RNA, 19 nt, Homo sapiens
  misc_RNA (1)...(19): siRNA sense strand
cuguagccgaggagaagaa

SEQ ID NO: 2674176 - RNA, 19 nt, Homo sapiens
  misc_RNA (1)...(19): siRNA sense strand
auacaucgauccugugauu

SEQ ID NO: 2674177 - RNA, 19 nt, Homo sapiens
  misc_RNA (1)...(19): siRNA sense strand
ucaugaaaggguacaaaga

SEQ ID NO: 2674178 - RNA, 19 nt, Homo sapiens
  misc_RNA (1)...(19): siRNA sense strand
agaaaagaggagaagaaca

SEQ ID NO: 2674179 - RNA, 19 nt, Homo sapiens
  misc_RNA (1)...(19): siRNA sense strand
ugaagggccuggaggacca

SEQ ID NO: 2674180 - RNA, 19 nt, Homo sapiens
  misc_RNA (1)...(19): siRNA sense strand
cugagauggcccuggugaa

SEQ ID NO: 2674181 - RNA, 19 nt, Homo sapiens
  misc_RNA (1)...(19): siRNA sense strand
gagaagacagccuuggaca

SEQ ID NO: 2674182 - RNA, 19 nt, Homo sapiens
  misc_RNA (1)...(19): siRNA sense strand
cagacaacauacagagauu

SEQ ID NO: 2674183 - RNA, 19 nt, Homo sapiens
  misc_RNA (1)...(19): siRNA sense strand
agaaggaccuggugggcau

SEQ ID NO: 2674184 - RNA, 19 nt, Homo sapiens
  misc_RNA (1)...(19): siRNA sense strand
gguccaaccaauaaguuua

SEQ ID NO: 2674185 - RNA, 19 nt, Homo sapiens
  misc_RNA (1)...(19): siRNA sense strand
ggaagagcauccaagaaga

SEQ ID NO: 2674186 - RNA, 19 nt, Homo sapiens
  misc_RNA (1)...(19): siRNA sense strand
ggcaaagagaucaaaggaa

SEQ ID NO: 2674187 - RNA, 19 nt, Homo sapiens
  misc_RNA (1)...(19): siRNA sense strand
agacaauaaccgugcuaga

SEQ ID NO: 2674188 - RNA, 19 nt, Homo sapiens
  misc_RNA (1)...(19): siRNA sense strand
augaggaagaugagaucaa

SEQ ID NO: 2674189 - RNA, 19 nt, Homo sapiens
  misc_RNA (1)...(19): siRNA sense strand
gcagcaaugaugaggacau

SEQ ID NO: 2674190 - RNA, 19 nt, Homo sapiens
  misc_RNA (1)...(19): siRNA sense strand
aggaugaggacgaggagga

SEQ ID NO: 2674191 - RNA, 19 nt, Homo sapiens
  misc_RNA (1)...(19): siRNA sense strand
gcagagaacagaagcagga

SEQ ID NO: 2674192 - RNA, 19 nt, Homo sapiens
  misc_RNA (1)...(19): siRNA sense strand
aguaaaucaggcaggaauu

SEQ ID NO: 2674193 - RNA, 19 nt, Homo sapiens
  misc_RNA (1)...(19): siRNA sense strand
gggagugggcuggaggaaa

SEQ ID NO: 2674194 - RNA, 19 nt, Homo sapiens
  misc_RNA (1)...(19): siRNA sense strand
cuuagaaacuaucuggaga

SEQ ID NO: 2674195 - RNA, 19 nt, Homo sapiens
  misc_RNA (1)...(19): siRNA sense strand
aaguaaaucaggcaggaau

SEQ ID NO: 2674196 - RNA, 19 nt, Homo sapiens
  misc_RNA (1)...(19): siRNA sense strand
aaucuaaacgcaagagcau

SEQ ID NO: 2674197 - RNA, 19 nt, Homo sapiens
  misc_RNA (1)...(19): siRNA sense strand
gcauccaagaagaggacau

SEQ ID NO: 2674198 - RNA, 19 nt, Homo sapiens
  misc_RNA (1)...(19): siRNA sense strand
aggaugggcuggaggaaac

SEQ ID NO: 2674199 - RNA, 19 nt, Homo sapiens
  misc_RNA (1)...(19): siRNA sense strand
ggucuuugcuuuccgagaa

SEQ ID NO: 2674200 - RNA, 19 nt, Homo sapiens
  misc_RNA (1)...(19): siRNA sense strand
gcaucgugcuucagggacu

SEQ ID NO: 2674201 - RNA, 19 nt, Homo sapiens
  misc_RNA (1)...(19): siRNA sense strand
agauggaugcgguggugaa

SEQ ID NO: 2674202 - RNA, 19 nt, Homo sapiens
  misc_RNA (1)...(19): siRNA sense strand
ugucaauggcaaagagauc

SEQ ID NO: 2674203 - RNA, 19 nt, Homo sapiens
  misc_RNA (1)...(19): siRNA sense strand
gagagguggucacggccua

SEQ ID NO: 2674204 - RNA, 19 nt, Homo sapiens
  misc_RNA (1)...(19): siRNA sense strand
cagacgaggacguuaucaa

SEQ ID NO: 2674205 - RNA, 19 nt, Homo sapiens
  misc_RNA (1)...(19): siRNA sense strand
uuagaaacuaucuggagaa

SEQ ID NO: 2674206 - RNA, 19 nt, Homo sapiens
  misc_RNA (1)...(19): siRNA sense strand
ccgagaaaccagagaggug

SEQ ID NO: 2674207 - RNA, 19 nt, Homo sapiens
  misc_RNA (1)...(19): siRNA sense strand
uggacaacaaaguggugaa

SEQ ID NO: 2674208 - RNA, 19 nt, Homo sapiens
  misc_RNA (1)...(19): siRNA sense strand
cuggcagagaagacaauaa

SEQ ID NO: 2674209 - RNA, 19 nt, Homo sapiens
  misc_RNA (1)...(19): siRNA sense strand
uccaagaggaagaagguga

SEQ ID NO: 2674210 - RNA, 19 nt, Homo sapiens
  misc_RNA (1)...(19): siRNA sense strand
cugcaggggagaaaaguaa

SEQ ID NO: 2674211 - RNA, 19 nt, Homo sapiens
  misc_RNA (1)...(19): siRNA sense strand
uggagaagguugugccucu

SEQ ID NO: 2674212 - RNA, 19 nt, Homo sapiens
  misc_RNA (1)...(19): siRNA sense strand
agagcgaggaugaggacga

SEQ ID NO: 2674213 - RNA, 19 nt, Homo sapiens
  misc_RNA (1)...(19): siRNA sense strand
aggcgaggguggaguccuu

SEQ ID NO: 2674214 - RNA, 19 nt, Homo sapiens
  misc_RNA (1)...(19): siRNA sense strand
caggaaagacaguugccau

SEQ ID NO: 2674215 - RNA, 19 nt, Homo sapiens
  misc_RNA (1)...(19): siRNA sense strand
gggaagagcauccaagaag

SEQ ID NO: 2674216 - RNA, 19 nt, Homo sapiens
  misc_RNA (1)...(19): siRNA sense strand
ucaugaagcuggaggaacc

SEQ ID NO: 2674217 - RNA, 19 nt, Homo sapiens
  misc_RNA (1)...(19): siRNA sense strand
ccucuggacuugauguuga

SEQ ID NO: 2674218 - RNA, 19 nt, Homo sapiens
  misc_RNA (1)...(19): siRNA sense strand
gcuuguggagagaguagua

SEQ ID NO: 2674219 - RNA, 19 nt, Homo sapiens
  misc_RNA (1)...(19): siRNA sense strand
ggcccaaagugcagguucu

SEQ ID NO: 2674220 - RNA, 19 nt, Homo sapiens
  misc_RNA (1)...(19): siRNA sense strand
ggaaagcacgugacggcca

SEQ ID NO: 2674221 - RNA, 19 nt, Homo sapiens
  misc_RNA (1)...(19): siRNA sense strand
caaagagaucaaaggaaag

SEQ ID NO: 2674222 - RNA, 19 nt, Homo sapiens
  misc_RNA (1)...(19): siRNA sense strand
cgucccaccugcagaggau

SEQ ID NO: 2674223 - RNA, 19 nt, Homo sapiens
  misc_RNA (1)...(19): siRNA sense strand
ggccagucaagcagggaga

SEQ ID NO: 2674224 - RNA, 19 nt, Homo sapiens
  misc_RNA (1)...(19): siRNA sense strand
ucaauggcaaagagaucaa

SEQ ID NO: 2674225 - RNA, 19 nt, Homo sapiens
  misc_RNA (1)...(19): siRNA sense strand
acaucaaauggguguguca

SEQ ID NO: 2674226 - RNA, 19 nt, Homo sapiens
  misc_RNA (1)...(19): siRNA sense strand
aaggaugggcuggaggaaa

SEQ ID NO: 2674227 - RNA, 19 nt, Homo sapiens
  misc_RNA (1)...(19): siRNA sense strand
gaggaagaugagaucaaga

SEQ ID NO: 2674228 - RNA, 19 nt, Homo sapiens
  misc_RNA (1)...(19): siRNA sense strand
ucaauaagccucugcagca

SEQ ID NO: 2674229 - RNA, 19 nt, Homo sapiens
  misc_RNA (1)...(19): siRNA sense strand
cugccaugccugagggucu

SEQ ID NO: 2674230 - RNA, 19 nt, Homo sapiens
  misc_RNA (1)...(19): siRNA sense strand
cuccuuaauucaagagcca

SEQ ID NO: 2674231 - RNA, 19 nt, Homo sapiens
  misc_RNA (1)...(19): siRNA sense strand
ggaaagaaaugaaaggcaa

SEQ ID NO: 2674232 - RNA, 19 nt, Homo sapiens
  misc_RNA (1)...(19): siRNA sense strand
cugaugaagacgugauuaa

SEQ ID NO: 2674233 - RNA, 19 nt, Homo sapiens
  misc_RNA (1)...(19): siRNA sense strand
ucucuuaacuggaaacuaa

SEQ ID NO: 2674234 - RNA, 19 nt, Homo sapiens
  misc_RNA (1)...(19): siRNA sense strand
gggcaaaggugaagaaagg

SEQ ID NO: 2674235 - RNA, 19 nt, Homo sapiens
  misc_RNA (1)...(19): siRNA sense strand
cgucuuugucaaugggaaa

SEQ ID NO: 2674236 - RNA, 19 nt, Homo sapiens
  misc_RNA (1)...(19): siRNA sense strand
agggaagacgcgaggagaa

SEQ ID NO: 2674237 - RNA, 19 nt, Homo sapiens
  misc_RNA (1)...(19): siRNA sense strand
uaccaaagaccgugaggaa

SEQ ID NO: 2674238 - RNA, 19 nt, Homo sapiens
  misc_RNA (1)...(19): siRNA sense strand
gaagaaagcagcuggcuca

SEQ ID NO: 2674239 - RNA, 19 nt, Homo sapiens
  misc_RNA (1)...(19): siRNA sense strand
ugaagaaaggcgugaacau

SEQ ID NO: 2674240 - RNA, 19 nt, Homo sapiens
  misc_RNA (1)...(19): siRNA sense strand
aggucaacgugguggugaa

SEQ ID NO: 2674241 - RNA, 19 nt, Homo sapiens
  misc_RNA (1)...(19): siRNA sense strand
gggaaagaaaugaaaggca

SEQ ID NO: 2674242 - RNA, 19 nt, Homo sapiens
  misc_RNA (1)...(19): siRNA sense strand
ccaaagaccgugaggaaag

SEQ ID NO: 2674243 - RNA, 19 nt, Homo sapiens
  misc_RNA (1)...(19): siRNA sense strand
cagaaauccaagcggaaga

SEQ ID NO: 2674244 - RNA, 19 nt, Homo sapiens
  misc_RNA (1)...(19): siRNA sense strand
cgugaugaguagcgaggau

SEQ ID NO: 2674245 - RNA, 19 nt, Homo sapiens
  misc_RNA (1)...(19): siRNA sense strand
gagggauccuugagagcau

SEQ ID NO: 2674246 - RNA, 19 nt, Homo sapiens
  misc_RNA (1)...(19): siRNA sense strand
aaaugaaaggcaaggucaa

SEQ ID NO: 2674247 - RNA, 19 nt, Homo sapiens
  misc_RNA (1)...(19): siRNA sense strand
gcauuaaaauacagacaca

SEQ ID NO: 2674248 - RNA, 19 nt, Homo sapiens
  misc_RNA (1)...(19): siRNA sense strand
gccagaaauccaagcggaa

SEQ ID NO: 2674249 - RNA, 19 nt, Homo sapiens
  misc_RNA (1)...(19): siRNA sense strand
cugcacaacuacauggaga

SEQ ID NO: 2674250 - RNA, 19 nt, Homo sapiens
  misc_RNA (1)...(19): siRNA sense strand
caggauaucaugaggaacu

SEQ ID NO: 2674251 - RNA, 19 nt, Homo sapiens
  misc_RNA (1)...(19): siRNA sense strand
cguugagggcaaaggugaa

SEQ ID NO: 2674252 - RNA, 19 nt, Homo sapiens
  misc_RNA (1)...(19): siRNA sense strand
ucaaggagcgcacggauua

SEQ ID NO: 2674253 - RNA, 19 nt, Homo sapiens
  misc_RNA (1)...(19): siRNA sense strand
gaggagaagcaaugggauc

SEQ ID NO: 2674254 - RNA, 19 nt, Homo sapiens
  misc_RNA (1)...(19): siRNA sense strand
gagaacugcgucuggacaa

SEQ ID NO: 2674255 - RNA, 19 nt, Homo sapiens
  misc_RNA (1)...(19): siRNA sense strand
cagaaauuccacugaagau

SEQ ID NO: 2674256 - RNA, 19 nt, Homo sapiens
  misc_RNA (1)...(19): siRNA sense strand
ccuacgaggucaugcagau

SEQ ID NO: 2674257 - RNA, 19 nt, Homo sapiens
  misc_RNA (1)...(19): siRNA sense strand
ccucgcaagaugagcaaau

SEQ ID NO: 2674258 - RNA, 19 nt, Homo sapiens
  misc_RNA (1)...(19): siRNA sense strand
cgcuucacguugagggcaa

SEQ ID NO: 2674259 - RNA, 19 nt, Homo sapiens
  misc_RNA (1)...(19): siRNA sense strand
ccaggaagcaacagggcca

SEQ ID NO: 2674260 - RNA, 19 nt, Homo sapiens
  misc_RNA (1)...(19): siRNA sense strand
ggacaaggcacccugguca

SEQ ID NO: 2674261 - RNA, 19 nt, Homo sapiens
  misc_RNA (1)...(19): siRNA sense strand
cggacaggccacagugaca

SEQ ID NO: 2674262 - RNA, 19 nt, Homo sapiens
  misc_RNA (1)...(19): siRNA sense strand
cgacuuagaaauugggaug

SEQ ID NO: 2674263 - RNA, 19 nt, Homo sapiens
  misc_RNA (1)...(19): siRNA sense strand
aaggagacgugcugacuuu

SEQ ID NO: 2674264 - RNA, 19 nt, Homo sapiens
  misc_RNA (1)...(19): siRNA sense strand
gacggaaggucgagggauc

SEQ ID NO: 2674265 - RNA, 19 nt, Homo sapiens
  misc_RNA (1)...(19): siRNA sense strand
guguagaucgucugaugaa

SEQ ID NO: 2674266 - RNA, 19 nt, Homo sapiens
  misc_RNA (1)...(19): siRNA sense strand
gaaaugaaaggcaagguca

SEQ ID NO: 2674267 - RNA, 19 nt, Homo sapiens
  misc_RNA (1)...(19): siRNA sense strand
cugcggaaacagaaggaca

SEQ ID NO: 2674268 - RNA, 19 nt, Homo sapiens
  misc_RNA (1)...(19): siRNA sense strand
gcacggauuauacuggaaa

SEQ ID NO: 2674269 - RNA, 19 nt, Homo sapiens
  misc_RNA (1)...(19): siRNA sense strand
aggcagaaauccugaacac

SEQ ID NO: 2674270 - RNA, 19 nt, Homo sapiens
  misc_RNA (1)...(19): siRNA sense strand
ggacgacggcacagugaca

SEQ ID NO: 2674271 - RNA, 19 nt, Homo sapiens
  misc_RNA (1)...(19): siRNA sense strand
ugacagagcugcuggaguc

SEQ ID NO: 2674272 - RNA, 19 nt, Homo sapiens
  misc_RNA (1)...(19): siRNA sense strand
ugauaaacugugugaccuu

SEQ ID NO: 2674273 - RNA, 19 nt, Homo sapiens
  misc_RNA (1)...(19): siRNA sense strand
cagacuggcaaguggacau

SEQ ID NO: 2674274 - RNA, 19 nt, Homo sapiens
  misc_RNA (1)...(19): siRNA sense strand
agaagaaaggccaggaaag

SEQ ID NO: 2674275 - RNA, 19 nt, Homo sapiens
  misc_RNA (1)...(19): siRNA sense strand
uggagucauuucugauuua

SEQ ID NO: 2674276 - RNA, 19 nt, Homo sapiens
  misc_RNA (1)...(19): siRNA sense strand
gggacagugaagaggagga

SEQ ID NO: 2674277 - RNA, 19 nt, Homo sapiens
  misc_RNA (1)...(19): siRNA sense strand
aagaaaggcgugaacauca

SEQ ID NO: 2674278 - RNA, 19 nt, Homo sapiens
  misc_RNA (1)...(19): siRNA sense strand
gaaagcagcuggcucagaa

SEQ ID NO: 2674279 - RNA, 19 nt, Homo sapiens
  misc_RNA (1)...(19): siRNA sense strand
ucgauguggagguggaaga

SEQ ID NO: 2674280 - RNA, 19 nt, Homo sapiens
  misc_RNA (1)...(19): siRNA sense strand
gaacuucugcagaggccaa

SEQ ID NO: 2674281 - RNA, 19 nt, Homo sapiens
  misc_RNA (1)...(19): siRNA sense strand
cccaaauucaaguggccua

SEQ ID NO: 2674282 - RNA, 19 nt, Homo sapiens
  misc_RNA (1)...(19): siRNA sense strand
agaucgauguggaggugga

SEQ ID NO: 2674283 - RNA, 19 nt, Homo sapiens
  misc_RNA (1)...(19): siRNA sense strand
ugggaguguccaagaucua

SEQ ID NO: 2674284 - RNA, 19 nt, Homo sapiens
  misc_RNA (1)...(19): siRNA sense strand
ugacgcaguuuguggcuga

SEQ ID NO: 2674285 - RNA, 19 nt, Homo sapiens
  misc_RNA (1)...(19): siRNA sense strand
agaaaggcgugaacaucau

SEQ ID NO: 2674286 - RNA, 19 nt, Homo sapiens
  misc_RNA (1)...(19): siRNA sense strand
acagugaagaggaggagga

SEQ ID NO: 2674287 - RNA, 19 nt, Homo sapiens
  misc_RNA (1)...(19): siRNA sense strand
cauccaaagggcugagcga

SEQ ID NO: 2674288 - RNA, 19 nt, Homo sapiens
  misc_RNA (1)...(19): siRNA sense strand
uggagagguuacaugaaaa

SEQ ID NO: 2674289 - RNA, 19 nt, Homo sapiens
  misc_RNA (1)...(19): siRNA sense strand
ggcccaaagugcagguucu

SEQ ID NO: 2674290 - RNA, 19 nt, Homo sapiens
  misc_RNA (1)...(19): siRNA sense strand
gaaagaaaugaaaggcaag

SEQ ID NO: 2674291 - RNA, 19 nt, Homo sapiens
  misc_RNA (1)...(19): siRNA sense strand
cagucacgcccuuggauau

SEQ ID NO: 2674292 - RNA, 19 nt, Homo sapiens
  misc_RNA (1)...(19): siRNA sense strand
guaaauaucuccucagcac

SEQ ID NO: 2674293 - RNA, 19 nt, Homo sapiens
  misc_RNA (1)...(19): siRNA sense strand
ugcggaaacagaaggacaa

SEQ ID NO: 2674294 - RNA, 19 nt, Homo sapiens
  misc_RNA (1)...(19): siRNA sense strand
ucgaggagcaggaagggau

SEQ ID NO: 2674295 - RNA, 19 nt, Homo sapiens
  misc_RNA (1)...(19): siRNA sense strand
accaggauaucaugaggaa

SEQ ID NO: 2674296 - RNA, 19 nt, Homo sapiens
  misc_RNA (1)...(19): siRNA sense strand
ccggagagaucacgucuga

SEQ ID NO: 2674297 - RNA, 19 nt, Homo sapiens
  misc_RNA (1)...(19): siRNA sense strand
ggaaacccucccugagaga

SEQ ID NO: 2674298 - RNA, 19 nt, Homo sapiens
  misc_RNA (1)...(19): siRNA sense strand
ccagaaauuccacugaaga

SEQ ID NO: 2674299 - RNA, 19 nt, Homo sapiens
  misc_RNA (1)...(19): siRNA sense strand
ggaaagaaaugaaaggcaa

SEQ ID NO: 2674300 - RNA, 19 nt, Homo sapiens
  misc_RNA (1)...(19): siRNA sense strand
cugaugaagacgugauuaa

SEQ ID NO: 2674301 - RNA, 19 nt, Homo sapiens
  misc_RNA (1)...(19): siRNA sense strand
ucucuuaacuggaaacuaa

SEQ ID NO: 2674302 - RNA, 19 nt, Homo sapiens
  misc_RNA (1)...(19): siRNA sense strand
gggcaaaggugaagaaagg

SEQ ID NO: 2674303 - RNA, 19 nt, Homo sapiens
  misc_RNA (1)...(19): siRNA sense strand
cgucuuugucaaugggaaa

SEQ ID NO: 2674304 - RNA, 19 nt, Homo sapiens
  misc_RNA (1)...(19): siRNA sense strand
agggaagacgcgaggagaa

SEQ ID NO: 2674305 - RNA, 19 nt, Homo sapiens
  misc_RNA (1)...(19): siRNA sense strand
uaccaaagaccgugaggaa

SEQ ID NO: 2674306 - RNA, 19 nt, Homo sapiens
  misc_RNA (1)...(19): siRNA sense strand
gaagaaagcagcuggcuca

SEQ ID NO: 2674307 - RNA, 19 nt, Homo sapiens
  misc_RNA (1)...(19): siRNA sense strand
ugaagaaaggcgugaacau

SEQ ID NO: 2674308 - RNA, 19 nt, Homo sapiens
  misc_RNA (1)...(19): siRNA sense strand
aggucaacgugguggugaa

SEQ ID NO: 2674309 - RNA, 19 nt, Homo sapiens
  misc_RNA (1)...(19): siRNA sense strand
gggaaagaaaugaaaggca

SEQ ID NO: 2674310 - RNA, 19 nt, Homo sapiens
  misc_RNA (1)...(19): siRNA sense strand
ccaaagaccgugaggaaag

SEQ ID NO: 2674311 - RNA, 19 nt, Homo sapiens
  misc_RNA (1)...(19): siRNA sense strand
cagaaauccaagcggaaga

SEQ ID NO: 2674312 - RNA, 19 nt, Homo sapiens
  misc_RNA (1)...(19): siRNA sense strand
cgugaugaguagcgaggau

SEQ ID NO: 2674313 - RNA, 19 nt, Homo sapiens
  misc_RNA (1)...(19): siRNA sense strand
gagggauccuugagagcau

SEQ ID NO: 2674314 - RNA, 19 nt, Homo sapiens
  misc_RNA (1)...(19): siRNA sense strand
aaaugaaaggcaaggucaa

SEQ ID NO: 2674315 - RNA, 19 nt, Homo sapiens
  misc_RNA (1)...(19): siRNA sense strand
gcauuaaaauacagacaca

SEQ ID NO: 2674316 - RNA, 19 nt, Homo sapiens
  misc_RNA (1)...(19): siRNA sense strand
gccagaaauccaagcggaa

SEQ ID NO: 2674317 - RNA, 19 nt, Homo sapiens
  misc_RNA (1)...(19): siRNA sense strand
cugcacaacuacauggaga

SEQ ID NO: 2674318 - RNA, 19 nt, Homo sapiens
  misc_RNA (1)...(19): siRNA sense strand
caggauaucaugaggaacu

SEQ ID NO: 2674319 - RNA, 19 nt, Homo sapiens
  misc_RNA (1)...(19): siRNA sense strand
cguugagggcaaaggugaa

SEQ ID NO: 2674320 - RNA, 19 nt, Homo sapiens
  misc_RNA (1)...(19): siRNA sense strand
ucaaggagcgcacggauua

SEQ ID NO: 2674321 - RNA, 19 nt, Homo sapiens
  misc_RNA (1)...(19): siRNA sense strand
gaggagaagcaaugggauc

SEQ ID NO: 2674322 - RNA, 19 nt, Homo sapiens
  misc_RNA (1)...(19): siRNA sense strand
gagaacugcgucuggacaa

SEQ ID NO: 2674323 - RNA, 19 nt, Homo sapiens
  misc_RNA (1)...(19): siRNA sense strand
cagaaauuccacugaagau

SEQ ID NO: 2674324 - RNA, 19 nt, Homo sapiens
  misc_RNA (1)...(19): siRNA sense strand
ccuacgaggucaugcagau

SEQ ID NO: 2674325 - RNA, 19 nt, Homo sapiens
  misc_RNA (1)...(19): siRNA sense strand
ccucgcaagaugagcaaau

SEQ ID NO: 2674326 - RNA, 19 nt, Homo sapiens
  misc_RNA (1)...(19): siRNA sense strand
cgcuucacguugagggcaa

SEQ ID NO: 2674327 - RNA, 19 nt, Homo sapiens
  misc_RNA (1)...(19): siRNA sense strand
ccaggaagcaacagggcca

SEQ ID NO: 2674328 - RNA, 19 nt, Homo sapiens
  misc_RNA (1)...(19): siRNA sense strand
ggacaaggcacccugguca

SEQ ID NO: 2674329 - RNA, 19 nt, Homo sapiens
  misc_RNA (1)...(19): siRNA sense strand
cggacaggccacagugaca

SEQ ID NO: 2674330 - RNA, 19 nt, Homo sapiens
  misc_RNA (1)...(19): siRNA sense strand
cgacuuagaaauugggaug

SEQ ID NO: 2674331 - RNA, 19 nt, Homo sapiens
  misc_RNA (1)...(19): siRNA sense strand
aaggagacgugcugacuuu

SEQ ID NO: 2674332 - RNA, 19 nt, Homo sapiens
  misc_RNA (1)...(19): siRNA sense strand
gacggaaggucgagggauc

SEQ ID NO: 2674333 - RNA, 19 nt, Homo sapiens
  misc_RNA (1)...(19): siRNA sense strand
guguagaucgucugaugaa

SEQ ID NO: 2674334 - RNA, 19 nt, Homo sapiens
  misc_RNA (1)...(19): siRNA sense strand
gaaaugaaaggcaagguca

SEQ ID NO: 2674335 - RNA, 19 nt, Homo sapiens
  misc_RNA (1)...(19): siRNA sense strand
cugcggaaacagaaggaca

SEQ ID NO: 2674336 - RNA, 19 nt, Homo sapiens
  misc_RNA (1)...(19): siRNA sense strand
gcacggauuauacuggaaa

SEQ ID NO: 2674337 - RNA, 19 nt, Homo sapiens
  misc_RNA (1)...(19): siRNA sense strand
aggcagaaauccugaacac

SEQ ID NO: 2674338 - RNA, 19 nt, Homo sapiens
  misc_RNA (1)...(19): siRNA sense strand
ggacgacggcacagugaca

SEQ ID NO: 2674339 - RNA, 19 nt, Homo sapiens
  misc_RNA (1)...(19): siRNA sense strand
ugacagagcugcuggaguc

SEQ ID NO: 2674340 - RNA, 19 nt, Homo sapiens
  misc_RNA (1)...(19): siRNA sense strand
ugauaaacugugugaccuu

SEQ ID NO: 2674341 - RNA, 19 nt, Homo sapiens
  misc_RNA (1)...(19): siRNA sense strand
cagacuggcaaguggacau

SEQ ID NO: 2674342 - RNA, 19 nt, Homo sapiens
  misc_RNA (1)...(19): siRNA sense strand
agaagaaaggccaggaaag

SEQ ID NO: 2674343 - RNA, 19 nt, Homo sapiens
  misc_RNA (1)...(19): siRNA sense strand
uggagucauuucugauuua

SEQ ID NO: 2674344 - RNA, 19 nt, Homo sapiens
  misc_RNA (1)...(19): siRNA sense strand
gggacagugaagaggagga

SEQ ID NO: 2674345 - RNA, 19 nt, Homo sapiens
  misc_RNA (1)...(19): siRNA sense strand
aagaaaggcgugaacauca

SEQ ID NO: 2674346 - RNA, 19 nt, Homo sapiens
  misc_RNA (1)...(19): siRNA sense strand
gaaagcagcuggcucagaa

SEQ ID NO: 2674347 - RNA, 19 nt, Homo sapiens
  misc_RNA (1)...(19): siRNA sense strand
ucgauguggagguggaaga

SEQ ID NO: 2674348 - RNA, 19 nt, Homo sapiens
  misc_RNA (1)...(19): siRNA sense strand
gaacuucugcagaggccaa

SEQ ID NO: 2674349 - RNA, 19 nt, Homo sapiens
  misc_RNA (1)...(19): siRNA sense strand
cccaaauucaaguggccua

SEQ ID NO: 2674350 - RNA, 19 nt, Homo sapiens
  misc_RNA (1)...(19): siRNA sense strand
agaucgauguggaggugga

SEQ ID NO: 2674351 - RNA, 19 nt, Homo sapiens
  misc_RNA (1)...(19): siRNA sense strand
ugggaguguccaagaucua

SEQ ID NO: 2674352 - RNA, 19 nt, Homo sapiens
  misc_RNA (1)...(19): siRNA sense strand
ugacgcaguuuguggcuga

SEQ ID NO: 2674353 - RNA, 19 nt, Homo sapiens
  misc_RNA (1)...(19): siRNA sense strand
agaaaggcgugaacaucau

SEQ ID NO: 2674354 - RNA, 19 nt, Homo sapiens
  misc_RNA (1)...(19): siRNA sense strand
acagugaagaggaggagga

SEQ ID NO: 2674355 - RNA, 19 nt, Homo sapiens
  misc_RNA (1)...(19): siRNA sense strand
cauccaaagggcugagcga

SEQ ID NO: 2674356 - RNA, 19 nt, Homo sapiens
  misc_RNA (1)...(19): siRNA sense strand
uggagagguuacaugaaaa

SEQ ID NO: 2674357 - RNA, 19 nt, Homo sapiens
  misc_RNA (1)...(19): siRNA sense strand
ggcccaaagugcagguucu

SEQ ID NO: 2674358 - RNA, 19 nt, Homo sapiens
  misc_RNA (1)...(19): siRNA sense strand
gaaagaaaugaaaggcaag

SEQ ID NO: 2674359 - RNA, 19 nt, Homo sapiens
  misc_RNA (1)...(19): siRNA sense strand
cagucacgcccuuggauau

SEQ ID NO: 2674360 - RNA, 19 nt, Homo sapiens
  misc_RNA (1)...(19): siRNA sense strand
guaaauaucuccucagcac

SEQ ID NO: 2674361 - RNA, 19 nt, Homo sapiens
  misc_RNA (1)...(19): siRNA sense strand
ugcggaaacagaaggacaa

SEQ ID NO: 2674362 - RNA, 19 nt, Homo sapiens
  misc_RNA (1)...(19): siRNA sense strand
ucgaggagcaggaagggau

SEQ ID NO: 2674363 - RNA, 19 nt, Homo sapiens
  misc_RNA (1)...(19): siRNA sense strand
accaggauaucaugaggaa

SEQ ID NO: 2674364 - RNA, 19 nt, Homo sapiens
  misc_RNA (1)...(19): siRNA sense strand
ccggagagaucacgucuga

SEQ ID NO: 2674365 - RNA, 19 nt, Homo sapiens
  misc_RNA (1)...(19): siRNA sense strand
ggaaacccucccugagaga

SEQ ID NO: 2674366 - RNA, 19 nt, Homo sapiens
  misc_RNA (1)...(19): siRNA sense strand
ccagaaauuccacugaaga

SEQ ID NO: 2674367 - RNA, 19 nt, Homo sapiens
  misc_RNA (1)...(19): siRNA sense strand
gcgcaaacguuaccggcua

SEQ ID NO: 2674368 - RNA, 19 nt, Homo sapiens
  misc_RNA (1)...(19): siRNA sense strand
gugccaagcagcaggaaau

SEQ ID NO: 2674369 - RNA, 19 nt, Homo sapiens
  misc_RNA (1)...(19): siRNA sense strand
aggugaagguucuggccaa

SEQ ID NO: 2674370 - RNA, 19 nt, Homo sapiens
  misc_RNA (1)...(19): siRNA sense strand
cuucauggcccgaguggaa

SEQ ID NO: 2674371 - RNA, 19 nt, Homo sapiens
  misc_RNA (1)...(19): siRNA sense strand
cugaaaugcagcuggaaga

SEQ ID NO: 2674372 - RNA, 19 nt, Homo sapiens
  misc_RNA (1)...(19): siRNA sense strand
caaucaaagccauuagcaa

SEQ ID NO: 2674373 - RNA, 19 nt, Homo sapiens
  misc_RNA (1)...(19): siRNA sense strand
augacaaggugaaggcaga

SEQ ID NO: 2674374 - RNA, 19 nt, Homo sapiens
  misc_RNA (1)...(19): siRNA sense strand
ucaucaagguuuaugguga

SEQ ID NO: 2674375 - RNA, 19 nt, Homo sapiens
  misc_RNA (1)...(19): siRNA sense strand
aagcagaugaugaggagau

SEQ ID NO: 2674376 - RNA, 19 nt, Homo sapiens
  misc_RNA (1)...(19): siRNA sense strand
auagagagaagcaggagaa

SEQ ID NO: 2674377 - RNA, 19 nt, Homo sapiens
  misc_RNA (1)...(19): siRNA sense strand
uggugaaauugaugaagau

SEQ ID NO: 2674378 - RNA, 19 nt, Homo sapiens
  misc_RNA (1)...(19): siRNA sense strand
ccaaugcgcucaaaggcaa

SEQ ID NO: 2674379 - RNA, 19 nt, Homo sapiens
  misc_RNA (1)...(19): siRNA sense strand
ccgcuggagcaaagggaga

SEQ ID NO: 2674380 - RNA, 19 nt, Homo sapiens
  misc_RNA (1)...(19): siRNA sense strand
gcgauuuggccgugaagga

SEQ ID NO: 2674381 - RNA, 19 nt, Homo sapiens
  misc_RNA (1)...(19): siRNA sense strand
agauacaagcagaugauga

SEQ ID NO: 2674382 - RNA, 19 nt, Homo sapiens
  misc_RNA (1)...(19): siRNA sense strand
aagccaagcuggagaaccu

SEQ ID NO: 2674383 - RNA, 19 nt, Homo sapiens
  misc_RNA (1)...(19): siRNA sense strand
ucgagagcuggaagagaaa

SEQ ID NO: 2674384 - RNA, 19 nt, Homo sapiens
  misc_RNA (1)...(19): siRNA sense strand
cugcagaaguccaagguuc

SEQ ID NO: 2674385 - RNA, 19 nt, Homo sapiens
  misc_RNA (1)...(19): siRNA sense strand
aggacgaggaggagcugua

SEQ ID NO: 2674386 - RNA, 19 nt, Homo sapiens
  misc_RNA (1)...(19): siRNA sense strand
uggaggaggacgaggagga

SEQ ID NO: 2674387 - RNA, 19 nt, Homo sapiens
  misc_RNA (1)...(19): siRNA sense strand
cugcaggacggguggauca

SEQ ID NO: 2674388 - RNA, 19 nt, Homo sapiens
  misc_RNA (1)...(19): siRNA sense strand
gcuacaacguccuggugga

SEQ ID NO: 2674389 - RNA, 19 nt, Homo sapiens
  misc_RNA (1)...(19): siRNA sense strand
cagacaucauggaggagga

SEQ ID NO: 2674390 - RNA, 19 nt, Homo sapiens
  misc_RNA (1)...(19): siRNA sense strand
ccucaagauuuuagggaac

SEQ ID NO: 2674391 - RNA, 19 nt, Homo sapiens
  misc_RNA (1)...(19): siRNA sense strand
uuaaagaaggccagaucau

SEQ ID NO: 2674392 - RNA, 19 nt, Homo sapiens
  misc_RNA (1)...(19): siRNA sense strand
gggaaaaugaacugaagga

SEQ ID NO: 2674393 - RNA, 19 nt, Homo sapiens
  misc_RNA (1)...(19): siRNA sense strand
cagacgaggaggacgccua

SEQ ID NO: 2674394 - RNA, 19 nt, Homo sapiens
  misc_RNA (1)...(19): siRNA sense strand
ucucagacaucauggagga

SEQ ID NO: 2674395 - RNA, 19 nt, Homo sapiens
  misc_RNA (1)...(19): siRNA sense strand
aggugaaggcagaguaugu

SEQ ID NO: 2674396 - RNA, 19 nt, Homo sapiens
  misc_RNA (1)...(19): siRNA sense strand
cagaugaugaggagaugau

SEQ ID NO: 2674397 - RNA, 19 nt, Homo sapiens
  misc_RNA (1)...(19): siRNA sense strand
aggcagaguaugugcaucu

SEQ ID NO: 2674398 - RNA, 19 nt, Homo sapiens
  misc_RNA (1)...(19): siRNA sense strand
acauggagaaugaacggaa

SEQ ID NO: 2674399 - RNA, 19 nt, Homo sapiens
  misc_RNA (1)...(19): siRNA sense strand
cauggagaaugaacggaau

SEQ ID NO: 2674400 - RNA, 19 nt, Homo sapiens
  misc_RNA (1)...(19): siRNA sense strand
uggagcaaagggagaagaa

SEQ ID NO: 2674401 - RNA, 19 nt, Homo sapiens
  misc_RNA (1)...(19): siRNA sense strand
gagaaaauagagagaagca

SEQ ID NO: 2674402 - RNA, 19 nt, Homo sapiens
  misc_RNA (1)...(19): siRNA sense strand
acgugaacaucgacgacau

SEQ ID NO: 2674403 - RNA, 19 nt, Homo sapiens
  misc_RNA (1)...(19): siRNA sense strand
ggccgagagcagcagguua

SEQ ID NO: 2674404 - RNA, 19 nt, Homo sapiens
  misc_RNA (1)...(19): siRNA sense strand
uggagaaaauagagagaag

SEQ ID NO: 2674405 - RNA, 19 nt, Homo sapiens
  misc_RNA (1)...(19): siRNA sense strand
gagcagaacuaaagcccuc

SEQ ID NO: 2674406 - RNA, 19 nt, Homo sapiens
  misc_RNA (1)...(19): siRNA sense strand
gcuuugaaugagaguacau

SEQ ID NO: 2674407 - RNA, 19 nt, Homo sapiens
  misc_RNA (1)...(19): siRNA sense strand
acaucauggaggaggacga

SEQ ID NO: 2674408 - RNA, 19 nt, Homo sapiens
  misc_RNA (1)...(19): siRNA sense strand
cuaugaagagucagaaacu

SEQ ID NO: 2674409 - RNA, 19 nt, Homo sapiens
  misc_RNA (1)...(19): siRNA sense strand
cggcaaaggucaggagagc

SEQ ID NO: 2674410 - RNA, 19 nt, Homo sapiens
  misc_RNA (1)...(19): siRNA sense strand
ggacccuggacgugaacau

SEQ ID NO: 2674411 - RNA, 19 nt, Homo sapiens
  misc_RNA (1)...(19): siRNA sense strand
gagcaaagggagaagaagg

SEQ ID NO: 2674412 - RNA, 19 nt, Homo sapiens
  misc_RNA (1)...(19): siRNA sense strand
uggccgugaaggagaaaca

SEQ ID NO: 2674413 - RNA, 19 nt, Homo sapiens
  misc_RNA (1)...(19): siRNA sense strand
gagcaggaucagaacuuca

SEQ ID NO: 2674414 - RNA, 19 nt, Homo sapiens
  misc_RNA (1)...(19): siRNA sense strand
ccagagaaagcucgcccaa

SEQ ID NO: 2674415 - RNA, 19 nt, Homo sapiens
  misc_RNA (1)...(19): siRNA sense strand
cugggcuucuucagggaaa

SEQ ID NO: 2674416 - RNA, 19 nt, Homo sapiens
  misc_RNA (1)...(19): siRNA sense strand
agcaaagggagaagaagga

SEQ ID NO: 2674417 - RNA, 19 nt, Homo sapiens
  misc_RNA (1)...(19): siRNA sense strand
ggauacaacuggagauauu

SEQ ID NO: 2674418 - RNA, 19 nt, Homo sapiens
  misc_RNA (1)...(19): siRNA sense strand
ccaaagucccggagugaua

SEQ ID NO: 2674419 - RNA, 19 nt, Homo sapiens
  misc_RNA (1)...(19): siRNA sense strand
ggagaacagucuagaccaa

SEQ ID NO: 2674420 - RNA, 19 nt, Homo sapiens
  misc_RNA (1)...(19): siRNA sense strand
ccggagugauacugaguua

SEQ ID NO: 2674421 - RNA, 19 nt, Homo sapiens
  misc_RNA (1)...(19): siRNA sense strand
gagauauuguggaagggaa

SEQ ID NO: 2674422 - RNA, 19 nt, Homo sapiens
  misc_RNA (1)...(19): siRNA sense strand
gggcagagcuucauccaga

SEQ ID NO: 2674423 - RNA, 19 nt, Homo sapiens
  misc_RNA (1)...(19): siRNA sense strand
cuggaagacacaaggagaa

SEQ ID NO: 2674424 - RNA, 19 nt, Homo sapiens
  misc_RNA (1)...(19): siRNA sense strand
ucuuaaaagccgugggaga

SEQ ID NO: 2674425 - RNA, 19 nt, Homo sapiens
  misc_RNA (1)...(19): siRNA sense strand
caaccugacagaagagaga

SEQ ID NO: 2674426 - RNA, 19 nt, Homo sapiens
  misc_RNA (1)...(19): siRNA sense strand
acuacaagauccauggaga

SEQ ID NO: 2674427 - RNA, 19 nt, Homo sapiens
  misc_RNA (1)...(19): siRNA sense strand
caggauacaacuggagaua

SEQ ID NO: 2674428 - RNA, 19 nt, Homo sapiens
  misc_RNA (1)...(19): siRNA sense strand
uguccuauuuacauggaaa

SEQ ID NO: 2674429 - RNA, 19 nt, Homo sapiens
  misc_RNA (1)...(19): siRNA sense strand
gccugaaagucuacgucaa

SEQ ID NO: 2674430 - RNA, 19 nt, Homo sapiens
  misc_RNA (1)...(19): siRNA sense strand
aggaccaggccaaguguua

SEQ ID NO: 2674431 - RNA, 19 nt, Homo sapiens
  misc_RNA (1)...(19): siRNA sense strand
cggaugagaucgccaugua

SEQ ID NO: 2674432 - RNA, 19 nt, Homo sapiens
  misc_RNA (1)...(19): siRNA sense strand
uggagaauguggaugggau

SEQ ID NO: 2674433 - RNA, 19 nt, Homo sapiens
  misc_RNA (1)...(19): siRNA sense strand
gcauuuaccugaaagagga

SEQ ID NO: 2674434 - RNA, 19 nt, Homo sapiens
  misc_RNA (1)...(19): siRNA sense strand
uggaagggaaggucaacaa

SEQ ID NO: 2674435 - RNA, 19 nt, Homo sapiens
  misc_RNA (1)...(19): siRNA sense strand
aagcacagauugacacgua

SEQ ID NO: 2674436 - RNA, 19 nt, Homo sapiens
  misc_RNA (1)...(19): siRNA sense strand
ugaaagaggaaaagggagu

SEQ ID NO: 2674437 - RNA, 19 nt, Homo sapiens
  misc_RNA (1)...(19): siRNA sense strand
ccaagaucgcggaggccau

SEQ ID NO: 2674438 - RNA, 19 nt, Homo sapiens
  misc_RNA (1)...(19): siRNA sense strand
ccaaggagggccugaaagu

SEQ ID NO: 2674439 - RNA, 19 nt, Homo sapiens
  misc_RNA (1)...(19): siRNA sense strand
ucuacagcauggugaucaa

SEQ ID NO: 2674440 - RNA, 19 nt, Homo sapiens
  misc_RNA (1)...(19): siRNA sense strand
gagcuguacacgcgggaca

SEQ ID NO: 2674441 - RNA, 19 nt, Homo sapiens
  misc_RNA (1)...(19): siRNA sense strand
ggccaaguguuaugagaac

SEQ ID NO: 2674442 - RNA, 19 nt, Homo sapiens
  misc_RNA (1)...(19): siRNA sense strand
accugacagaagagagaaa

SEQ ID NO: 2674443 - RNA, 19 nt, Homo sapiens
  misc_RNA (1)...(19): siRNA sense strand
aggccaaguguuaugagaa

SEQ ID NO: 2674444 - RNA, 19 nt, Homo sapiens
  misc_RNA (1)...(19): siRNA sense strand
ggagaauguggaugggauc

SEQ ID NO: 2674445 - RNA, 19 nt, Homo sapiens
  misc_RNA (1)...(19): siRNA sense strand
agaucagcgccgacaacua

SEQ ID NO: 2674446 - RNA, 19 nt, Homo sapiens
  misc_RNA (1)...(19): siRNA sense strand
ggaagggaaggucaacaaa

SEQ ID NO: 2674447 - RNA, 19 nt, Homo sapiens
  misc_RNA (1)...(19): siRNA sense strand
cgggacaauuccaugacau

SEQ ID NO: 2674448 - RNA, 19 nt, Homo sapiens
  misc_RNA (1)...(19): siRNA sense strand
caucauaaccaaccugaca

SEQ ID NO: 2674449 - RNA, 19 nt, Homo sapiens
  misc_RNA (1)...(19): siRNA sense strand
aagcucagcccuugggaca

SEQ ID NO: 2674450 - RNA, 19 nt, Homo sapiens
  misc_RNA (1)...(19): siRNA sense strand
acaaaggcauuuaccugaa

SEQ ID NO: 2674451 - RNA, 19 nt, Homo sapiens
  misc_RNA (1)...(19): siRNA sense strand
caacgucaaccucgugaua

SEQ ID NO: 2674452 - RNA, 19 nt, Homo sapiens
  misc_RNA (1)...(19): siRNA sense strand
ugauagggucugagcagga

SEQ ID NO: 2674453 - RNA, 19 nt, Homo sapiens
  misc_RNA (1)...(19): siRNA sense strand
gcgccgugguacugagucu

SEQ ID NO: 2674454 - RNA, 19 nt, Homo sapiens
  misc_RNA (1)...(19): siRNA sense strand
ggaaauccaaggagggccu

SEQ ID NO: 2674455 - RNA, 19 nt, Homo sapiens
  misc_RNA (1)...(19): siRNA sense strand
uguuugucaucguggucaa

SEQ ID NO: 2674456 - RNA, 19 nt, Homo sapiens
  misc_RNA (1)...(19): siRNA sense strand
cuggguaccucgugggucu

SEQ ID NO: 2674457 - RNA, 19 nt, Homo sapiens
  misc_RNA (1)...(19): siRNA sense strand
caucaaaccagcaggacaa

SEQ ID NO: 2674458 - RNA, 19 nt, Homo sapiens
  misc_RNA (1)...(19): siRNA sense strand
ccaggaugcucuugaacaa

SEQ ID NO: 2674459 - RNA, 19 nt, Homo sapiens
  misc_RNA (1)...(19): siRNA sense strand
gcaucaaaccagcaggaca

SEQ ID NO: 2674460 - RNA, 19 nt, Homo sapiens
  misc_RNA (1)...(19): siRNA sense strand
gagcuuugguguggauuua

SEQ ID NO: 2674461 - RNA, 19 nt, Homo sapiens
  misc_RNA (1)...(19): siRNA sense strand
caaaccagcaggacaacaa

SEQ ID NO: 2674462 - RNA, 19 nt, Homo sapiens
  misc_RNA (1)...(19): siRNA sense strand
ggguuguuggccauggaaa

SEQ ID NO: 2674463 - RNA, 19 nt, Homo sapiens
  misc_RNA (1)...(19): siRNA sense strand
ccauggaaaccuaaucaau

SEQ ID NO: 2674464 - RNA, 19 nt, Homo sapiens
  misc_RNA (1)...(19): siRNA sense strand
gaggaaggcaagugggaga

SEQ ID NO: 2674465 - RNA, 19 nt, Homo sapiens
  misc_RNA (1)...(19): siRNA sense strand
gaagaugucauuaagguaa

SEQ ID NO: 2674466 - RNA, 19 nt, Homo sapiens
  misc_RNA (1)...(19): siRNA sense strand
agacaaccuucgugggcau

SEQ ID NO: 2674467 - RNA, 19 nt, Homo sapiens
  misc_RNA (1)...(19): siRNA sense strand
aaggcaagugggagaacaa

SEQ ID NO: 2674468 - RNA, 19 nt, Homo sapiens
  misc_RNA (1)...(19): siRNA sense strand
agauaacggcagugagagu

SEQ ID NO: 2674469 - RNA, 19 nt, Homo sapiens
  misc_RNA (1)...(19): siRNA sense strand
agaaggugucucugagcua

SEQ ID NO: 2674470 - RNA, 19 nt, Homo sapiens
  misc_RNA (1)...(19): siRNA sense strand
gcuaagaaauccagaccag

SEQ ID NO: 2674471 - RNA, 19 nt, Homo sapiens
  misc_RNA (1)...(19): siRNA sense strand
ccuuaaagaagccaaccaa

SEQ ID NO: 2674472 - RNA, 19 nt, Homo sapiens
  misc_RNA (1)...(19): siRNA sense strand
ugaagaugucauuaaggua

SEQ ID NO: 2674473 - RNA, 19 nt, Homo sapiens
  misc_RNA (1)...(19): siRNA sense strand
uuucaguggagaagauaau

SEQ ID NO: 2674474 - RNA, 19 nt, Homo sapiens
  misc_RNA (1)...(19): siRNA sense strand
ccuuuggaaacauggacaa

SEQ ID NO: 2674475 - RNA, 19 nt, Homo sapiens
  misc_RNA (1)...(19): siRNA sense strand
ugacagugaccuuacggaa

SEQ ID NO: 2674476 - RNA, 19 nt, Homo sapiens
  misc_RNA (1)...(19): siRNA sense strand
cggcagcaggugugaagau

SEQ ID NO: 2674477 - RNA, 19 nt, Homo sapiens
  misc_RNA (1)...(19): siRNA sense strand
uggcugaaguugcugguca

SEQ ID NO: 2674478 - RNA, 19 nt, Homo sapiens
  misc_RNA (1)...(19): siRNA sense strand
ggaaauugauaauggcagc

SEQ ID NO: 2674479 - RNA, 19 nt, Homo sapiens
  misc_RNA (1)...(19): siRNA sense strand
ccgagagaggauugggagu

SEQ ID NO: 2674480 - RNA, 19 nt, Homo sapiens
  misc_RNA (1)...(19): siRNA sense strand
cugaaguggucccugguga

SEQ ID NO: 2674481 - RNA, 19 nt, Homo sapiens
  misc_RNA (1)...(19): siRNA sense strand
uggugagcuuggacgagaa

SEQ ID NO: 2674482 - RNA, 19 nt, Homo sapiens
  misc_RNA (1)...(19): siRNA sense strand
acgaggacgaugaggagaa

SEQ ID NO: 2674483 - RNA, 19 nt, Homo sapiens
  misc_RNA (1)...(19): siRNA sense strand
cuggaaauacagacacaaa

SEQ ID NO: 2674484 - RNA, 19 nt, Homo sapiens
  misc_RNA (1)...(19): siRNA sense strand
aggacgaugaggagaagaa

SEQ ID NO: 2674485 - RNA, 19 nt, Homo sapiens
  misc_RNA (1)...(19): siRNA sense strand
gggaagaauaaguuacuca

SEQ ID NO: 2674486 - RNA, 19 nt, Homo sapiens
  misc_RNA (1)...(19): siRNA sense strand
gaggaaaguaccaacaaaa

SEQ ID NO: 2674487 - RNA, 19 nt, Homo sapiens
  misc_RNA (1)...(19): siRNA sense strand
ggucgggagccgggaauaa

SEQ ID NO: 2674488 - RNA, 19 nt, Homo sapiens
  misc_RNA (1)...(19): siRNA sense strand
ugcagagggugaaggacaa

SEQ ID NO: 2674489 - RNA, 19 nt, Homo sapiens
  misc_RNA (1)...(19): siRNA sense strand
gcccaaagaggaagagagu

SEQ ID NO: 2674490 - RNA, 19 nt, Homo sapiens
  misc_RNA (1)...(19): siRNA sense strand
gggaaagcgaugacgagga

SEQ ID NO: 2674491 - RNA, 19 nt, Homo sapiens
  misc_RNA (1)...(19): siRNA sense strand
cggugauuguccuggauga

SEQ ID NO: 2674492 - RNA, 19 nt, Homo sapiens
  misc_RNA (1)...(19): siRNA sense strand
acucaaaagugguggucca

SEQ ID NO: 2674493 - RNA, 19 nt, Homo sapiens
  misc_RNA (1)...(19): siRNA sense strand
uugcagagggugaaggaca

SEQ ID NO: 2674494 - RNA, 19 nt, Homo sapiens
  misc_RNA (1)...(19): siRNA sense strand
gggaaggaaaugaagagca

SEQ ID NO: 2674495 - RNA, 19 nt, Homo sapiens
  misc_RNA (1)...(19): siRNA sense strand
ccaucagaggagugcacaa

SEQ ID NO: 2674496 - RNA, 19 nt, Homo sapiens
  misc_RNA (1)...(19): siRNA sense strand
gggugaaggacaagggccu

SEQ ID NO: 2674497 - RNA, 19 nt, Homo sapiens
  misc_RNA (1)...(19): siRNA sense strand
ggguaaaggaaaugucaag

SEQ ID NO: 2674498 - RNA, 19 nt, Homo sapiens
  misc_RNA (1)...(19): siRNA sense strand
cgaaggaaaccaggagaga

SEQ ID NO: 2674499 - RNA, 19 nt, Homo sapiens
  misc_RNA (1)...(19): siRNA sense strand
cuuuagagacuauauggaa

SEQ ID NO: 2674500 - RNA, 19 nt, Homo sapiens
  misc_RNA (1)...(19): siRNA sense strand
cuauauggaaagucugcaa

SEQ ID NO: 2674501 - RNA, 19 nt, Homo sapiens
  misc_RNA (1)...(19): siRNA sense strand
cugagaagacggugauugu

SEQ ID NO: 2674502 - RNA, 19 nt, Homo sapiens
  misc_RNA (1)...(19): siRNA sense strand
ugccguggguaaaggaaau

SEQ ID NO: 2674503 - RNA, 19 nt, Homo sapiens
  misc_RNA (1)...(19): siRNA sense strand
gauaacaucaagugggucu

SEQ ID NO: 2674504 - RNA, 19 nt, Homo sapiens
  misc_RNA (1)...(19): siRNA sense strand
agaccaagaggaagagugu

SEQ ID NO: 2674505 - RNA, 19 nt, Homo sapiens
  misc_RNA (1)...(19): siRNA sense strand
gggcuaacggacuuggaga

SEQ ID NO: 2674506 - RNA, 19 nt, Homo sapiens
  misc_RNA (1)...(19): siRNA sense strand
cagaaggccuacccgggaa

SEQ ID NO: 2674507 - RNA, 19 nt, Homo sapiens
  misc_RNA (1)...(19): siRNA sense strand
agagcaaaguggacacgau

SEQ ID NO: 2674508 - RNA, 19 nt, Homo sapiens
  misc_RNA (1)...(19): siRNA sense strand
guguucuugccguggguaa

SEQ ID NO: 2674509 - RNA, 19 nt, Homo sapiens
  misc_RNA (1)...(19): siRNA sense strand
cugugagugagcagggcaa

SEQ ID NO: 2674510 - RNA, 19 nt, Homo sapiens
  misc_RNA (1)...(19): siRNA sense strand
ggccaauugugguugcaga

SEQ ID NO: 2674511 - RNA, 19 nt, Homo sapiens
  misc_RNA (1)...(19): siRNA sense strand
gccuggaaauacagacaca

SEQ ID NO: 2674512 - RNA, 19 nt, Homo sapiens
  misc_RNA (1)...(19): siRNA sense strand
aggaagagagucaaguuca

SEQ ID NO: 2674513 - RNA, 19 nt, Homo sapiens
  misc_RNA (1)...(19): siRNA sense strand
ugaagguggaggagccgaa

SEQ ID NO: 2674514 - RNA, 19 nt, Homo sapiens
  misc_RNA (1)...(19): siRNA sense strand
augaaaugguggugucugu

SEQ ID NO: 2674515 - RNA, 19 nt, Homo sapiens
  misc_RNA (1)...(19): siRNA sense strand
ugucagaagaccaagagga

SEQ ID NO: 2674516 - RNA, 19 nt, Homo sapiens
  misc_RNA (1)...(19): siRNA sense strand
uguuugacagcgaugauaa

SEQ ID NO: 2674517 - RNA, 19 nt, Homo sapiens
  misc_RNA (1)...(19): siRNA sense strand
uuugugaaugggaaggaaa

SEQ ID NO: 2674518 - RNA, 19 nt, Homo sapiens
  misc_RNA (1)...(19): siRNA sense strand
caauaauccuagugaccuc

SEQ ID NO: 2674519 - RNA, 19 nt, Homo sapiens
  misc_RNA (1)...(19): siRNA sense strand
uggugucuguccaggcaaa

SEQ ID NO: 2674520 - RNA, 19 nt, Homo sapiens
  misc_RNA (1)...(19): siRNA sense strand
aggaaaugucaaggucaaa

SEQ ID NO: 2674521 - RNA, 19 nt, Homo sapiens
  misc_RNA (1)...(19): siRNA sense strand
uugugaaugggaaggaaau

SEQ ID NO: 2674522 - RNA, 19 nt, Homo sapiens
  misc_RNA (1)...(19): siRNA sense strand
acuaugucuaugagaaaga

SEQ ID NO: 2674523 - RNA, 19 nt, Homo sapiens
  misc_RNA (1)...(19): siRNA sense strand
agaugaaggaugagggauu

SEQ ID NO: 2674524 - RNA, 19 nt, Homo sapiens
  misc_RNA (1)...(19): siRNA sense strand
ucgacaagauggaggagga

SEQ ID NO: 2674525 - RNA, 19 nt, Homo sapiens
  misc_RNA (1)...(19): siRNA sense strand
acaagauggaggaggagau

SEQ ID NO: 2674526 - RNA, 19 nt, Homo sapiens
  misc_RNA (1)...(19): siRNA sense strand
ggaagaacucggugcggca

SEQ ID NO: 2674527 - RNA, 19 nt, Homo sapiens
  misc_RNA (1)...(19): siRNA sense strand
aggagaugcacaaguggaa

SEQ ID NO: 2674528 - RNA, 19 nt, Homo sapiens
  misc_RNA (1)...(19): siRNA sense strand
uggaggaggagaugcacaa

SEQ ID NO: 2674529 - RNA, 19 nt, Homo sapiens
  misc_RNA (1)...(19): siRNA sense strand
uggccaacccugaggaguu

SEQ ID NO: 2674530 - RNA, 19 nt, Homo sapiens
  misc_RNA (1)...(19): siRNA sense strand
cugaacaagugcuucgaga

SEQ ID NO: 2674531 - RNA, 19 nt, Homo sapiens
  misc_RNA (1)...(19): siRNA sense strand
ggagaugaaggaugaggga

SEQ ID NO: 2674532 - RNA, 19 nt, Homo sapiens
  misc_RNA (1)...(19): siRNA sense strand
auaacuggccacagagaca

SEQ ID NO: 2674533 - RNA, 19 nt, Homo sapiens
  misc_RNA (1)...(19): siRNA sense strand
ucgccauggcccugaagaa

SEQ ID NO: 2674534 - RNA, 19 nt, Homo sapiens
  misc_RNA (1)...(19): siRNA sense strand
agauggaggaggagaugca

SEQ ID NO: 2674535 - RNA, 19 nt, Homo sapiens
  misc_RNA (1)...(19): siRNA sense strand
augcacaaguggaagagga

SEQ ID NO: 2674536 - RNA, 19 nt, Homo sapiens
  misc_RNA (1)...(19): siRNA sense strand
cuguagacuucaucaacau

SEQ ID NO: 2674537 - RNA, 19 nt, Homo sapiens
  misc_RNA (1)...(19): siRNA sense strand
acccugaggaguuggacaa

SEQ ID NO: 2674538 - RNA, 19 nt, Homo sapiens
  misc_RNA (1)...(19): siRNA sense strand
ccugaagaacagcaagaca

SEQ ID NO: 2674539 - RNA, 19 nt, Homo sapiens
  misc_RNA (1)...(19): siRNA sense strand
gagaacaagaugagcggcu

SEQ ID NO: 2674540 - RNA, 19 nt, Homo sapiens
  misc_RNA (1)...(19): siRNA sense strand
ugcacaaguggaagaggaa

SEQ ID NO: 2674541 - RNA, 19 nt, Homo sapiens
  misc_RNA (1)...(19): siRNA sense strand
gcccugaagaacagcaaga

SEQ ID NO: 2674542 - RNA, 19 nt, Homo sapiens
  misc_RNA (1)...(19): siRNA sense strand
gugcagaugaaaugggaau

SEQ ID NO: 2674543 - RNA, 19 nt, Homo sapiens
  misc_RNA (1)...(19): siRNA sense strand
cuggaaaaguggugccaaa

SEQ ID NO: 2674544 - RNA, 19 nt, Homo sapiens
  misc_RNA (1)...(19): siRNA sense strand
agaaggagcugcagggcca

SEQ ID NO: 2674545 - RNA, 19 nt, Homo sapiens
  misc_RNA (1)...(19): siRNA sense strand
gggcuggaggacagauaaa

SEQ ID NO: 2674546 - RNA, 19 nt, Homo sapiens
  misc_RNA (1)...(19): siRNA sense strand
cggaguuaauggaagucaa

SEQ ID NO: 2674547 - RNA, 19 nt, Homo sapiens
  misc_RNA (1)...(19): siRNA sense strand
auaaagcagaugugacaaa

SEQ ID NO: 2674548 - RNA, 19 nt, Homo sapiens
  misc_RNA (1)...(19): siRNA sense strand
caguaaacaaugugaaugu

SEQ ID NO: 2674549 - RNA, 19 nt, Homo sapiens
  misc_RNA (1)...(19): siRNA sense strand
uggauaagagggaggcgua

SEQ ID NO: 2674550 - RNA, 19 nt, Homo sapiens
  misc_RNA (1)...(19): siRNA sense strand
ggacauuggaaggccgaaa

SEQ ID NO: 2674551 - RNA, 19 nt, Homo sapiens
  misc_RNA (1)...(19): siRNA sense strand
aggaagaggcugagcucca

SEQ ID NO: 2674552 - RNA, 19 nt, Homo sapiens
  misc_RNA (1)...(19): siRNA sense strand
caaaauacgcacagaacau

SEQ ID NO: 2674553 - RNA, 19 nt, Homo sapiens
  misc_RNA (1)...(19): siRNA sense strand
agucuuacuccgacauaaa

SEQ ID NO: 2674554 - RNA, 19 nt, Homo sapiens
  misc_RNA (1)...(19): siRNA sense strand
uggacuugaugaagccaaa

SEQ ID NO: 2674555 - RNA, 19 nt, Homo sapiens
  misc_RNA (1)...(19): siRNA sense strand
gaucugaaagacagggaca

SEQ ID NO: 2674556 - RNA, 19 nt, Homo sapiens
  misc_RNA (1)...(19): siRNA sense strand
cuuacuauguucaagacaa

SEQ ID NO: 2674557 - RNA, 19 nt, Homo sapiens
  misc_RNA (1)...(19): siRNA sense strand
uauuuaagggagaagacaa

SEQ ID NO: 2674558 - RNA, 19 nt, Homo sapiens
  misc_RNA (1)...(19): siRNA sense strand
uuugcaagacugagagauu

SEQ ID NO: 2674559 - RNA, 19 nt, Homo sapiens
  misc_RNA (1)...(19): siRNA sense strand
cgauuagaacacagaaguu

SEQ ID NO: 2674560 - RNA, 19 nt, Homo sapiens
  misc_RNA (1)...(19): siRNA sense strand
gcagaugugacaaaagaaa

SEQ ID NO: 2674561 - RNA, 19 nt, Homo sapiens
  misc_RNA (1)...(19): siRNA sense strand
gaguuugaucugaaagaca

SEQ ID NO: 2674562 - RNA, 19 nt, Homo sapiens
  misc_RNA (1)...(19): siRNA sense strand
cagauaaagcagaaguugu

SEQ ID NO: 2674563 - RNA, 19 nt, Homo sapiens
  misc_RNA (1)...(19): siRNA sense strand
ccauggagcucucugccaa

SEQ ID NO: 2674564 - RNA, 19 nt, Homo sapiens
  misc_RNA (1)...(19): siRNA sense strand
cggaaugugcuacugcaaa

SEQ ID NO: 2674565 - RNA, 19 nt, Homo sapiens
  misc_RNA (1)...(19): siRNA sense strand
uggaaauguuaauggcugu

SEQ ID NO: 2674566 - RNA, 19 nt, Homo sapiens
  misc_RNA (1)...(19): siRNA sense strand
ccgaagaaucuguaucuca

SEQ ID NO: 2674567 - RNA, 19 nt, Homo sapiens
  misc_RNA (1)...(19): siRNA sense strand
cccaagaaauggagcgccu

SEQ ID NO: 2674568 - RNA, 19 nt, Homo sapiens
  misc_RNA (1)...(19): siRNA sense strand
uguuaaugguuacgaagca

SEQ ID NO: 2674569 - RNA, 19 nt, Homo sapiens
  misc_RNA (1)...(19): siRNA sense strand
guuaaugguuacgaagcaa

SEQ ID NO: 2674570 - RNA, 19 nt, Homo sapiens
  misc_RNA (1)...(19): siRNA sense strand
uggaagggacccaggcuga

SEQ ID NO: 2674571 - RNA, 19 nt, Homo sapiens
  misc_RNA (1)...(19): siRNA sense strand
gccagaauguggaggcugu

SEQ ID NO: 2674572 - RNA, 19 nt, Homo sapiens
  misc_RNA (1)...(19): siRNA sense strand
auuucuaugugcagaugaa

SEQ ID NO: 2674573 - RNA, 19 nt, Homo sapiens
  misc_RNA (1)...(19): siRNA sense strand
ugaaagaacuaaauccgga

SEQ ID NO: 2674574 - RNA, 19 nt, Homo sapiens
  misc_RNA (1)...(19): siRNA sense strand
guuaauggcuguagcacug

SEQ ID NO: 2674575 - RNA, 19 nt, Homo sapiens
  misc_RNA (1)...(19): siRNA sense strand
gagggaucagccagacaaa

SEQ ID NO: 2674576 - RNA, 19 nt, Homo sapiens
  misc_RNA (1)...(19): siRNA sense strand
guucaagacaauggcagaa

SEQ ID NO: 2674577 - RNA, 19 nt, Homo sapiens
  misc_RNA (1)...(19): siRNA sense strand
ggagaaagcuaaucagcga

SEQ ID NO: 2674578 - RNA, 19 nt, Homo sapiens
  misc_RNA (1)...(19): siRNA sense strand
aggaacagauggaggagga

SEQ ID NO: 2674579 - RNA, 19 nt, Homo sapiens
  misc_RNA (1)...(19): siRNA sense strand
gggaaagcauccugggucu

SEQ ID NO: 2674580 - RNA, 19 nt, Homo sapiens
  misc_RNA (1)...(19): siRNA sense strand
aggaggaugcugaggaaga

SEQ ID NO: 2674581 - RNA, 19 nt, Homo sapiens
  misc_RNA (1)...(19): siRNA sense strand
agagaaaugaggcggaaaa

SEQ ID NO: 2674582 - RNA, 19 nt, Homo sapiens
  misc_RNA (1)...(19): siRNA sense strand
gguggaaagucuccgggaa

SEQ ID NO: 2674583 - RNA, 19 nt, Homo sapiens
  misc_RNA (1)...(19): siRNA sense strand
agaaggaggcacugcggaa

SEQ ID NO: 2674584 - RNA, 19 nt, Homo sapiens
  misc_RNA (1)...(19): siRNA sense strand
gaugguggcuccuguauua

SEQ ID NO: 2674585 - RNA, 19 nt, Homo sapiens
  misc_RNA (1)...(19): siRNA sense strand
gagcaggccaagaaggaga

SEQ ID NO: 2674586 - RNA, 19 nt, Homo sapiens
  misc_RNA (1)...(19): siRNA sense strand
gcagagaaaugaggcggaa

SEQ ID NO: 2674587 - RNA, 19 nt, Homo sapiens
  misc_RNA (1)...(19): siRNA sense strand
gggaagauguacucaggca

SEQ ID NO: 2674588 - RNA, 19 nt, Homo sapiens
  misc_RNA (1)...(19): siRNA sense strand
cugacuaugaggaaauuaa

SEQ ID NO: 2674589 - RNA, 19 nt, Homo sapiens
  misc_RNA (1)...(19): siRNA sense strand
aguccuacauucagcgcua

SEQ ID NO: 2674590 - RNA, 19 nt, Homo sapiens
  misc_RNA (1)...(19): siRNA sense strand
ggagaaaaucaaaguccua

SEQ ID NO: 2674591 - RNA, 19 nt, Homo sapiens
  misc_RNA (1)...(19): siRNA sense strand
aagagaagcuccaggccca

SEQ ID NO: 2674592 - RNA, 19 nt, Homo sapiens
  misc_RNA (1)...(19): siRNA sense strand
auaugaagaagcuggagaa

SEQ ID NO: 2674593 - RNA, 19 nt, Homo sapiens
  misc_RNA (1)...(19): siRNA sense strand
ccauagaaaagcuggaaga

SEQ ID NO: 2674594 - RNA, 19 nt, Homo sapiens
  misc_RNA (1)...(19): siRNA sense strand
aggagggcccugaggagaa

SEQ ID NO: 2674595 - RNA, 19 nt, Homo sapiens
  misc_RNA (1)...(19): siRNA sense strand
cuggagagcagcaaggaga

SEQ ID NO: 2674596 - RNA, 19 nt, Homo sapiens
  misc_RNA (1)...(19): siRNA sense strand
cggcaugagaagauggcca

SEQ ID NO: 2674597 - RNA, 19 nt, Homo sapiens
  misc_RNA (1)...(19): siRNA sense strand
ccaagagggugaaggaggu

SEQ ID NO: 2674598 - RNA, 19 nt, Homo sapiens
  misc_RNA (1)...(19): siRNA sense strand
gauaugaagaagcuggaga

SEQ ID NO: 2674599 - RNA, 19 nt, Homo sapiens
  misc_RNA (1)...(19): siRNA sense strand
uggccagcccugaggaaga

SEQ ID NO: 2674600 - RNA, 19 nt, Homo sapiens
  misc_RNA (1)...(19): siRNA sense strand
aggccaagaaggagaucga

SEQ ID NO: 2674601 - RNA, 19 nt, Homo sapiens
  misc_RNA (1)...(19): siRNA sense strand
ggacccaggaugagccaga

SEQ ID NO: 2674602 - RNA, 19 nt, Homo sapiens
  misc_RNA (1)...(19): siRNA sense strand
cagagaaaugaggcggaaa

SEQ ID NO: 2674603 - RNA, 19 nt, Homo sapiens
  misc_RNA (1)...(19): siRNA sense strand
gauuggaccugcagggauc

SEQ ID NO: 2674604 - RNA, 19 nt, Homo sapiens
  misc_RNA (1)...(19): siRNA sense strand
ccgccuucgugcagagcau

SEQ ID NO: 2674605 - RNA, 19 nt, Homo sapiens
  misc_RNA (1)...(19): siRNA sense strand
ggagcuggacaaaggccaa

SEQ ID NO: 2674606 - RNA, 19 nt, Homo sapiens
  misc_RNA (1)...(19): siRNA sense strand
aaaauguaccugaggaaau

SEQ ID NO: 2674607 - RNA, 19 nt, Homo sapiens
  misc_RNA (1)...(19): siRNA sense strand
acagaaaccuugcugcaga

SEQ ID NO: 2674608 - RNA, 19 nt, Homo sapiens
  misc_RNA (1)...(19): siRNA sense strand
agaaggagaucgagucgca

SEQ ID NO: 2674609 - RNA, 19 nt, Homo sapiens
  misc_RNA (1)...(19): siRNA sense strand
ggccgaagccauggagcaa

SEQ ID NO: 2674610 - RNA, 19 nt, Homo sapiens
  misc_RNA (1)...(19): siRNA sense strand
ccuaucagcuggaacccua

SEQ ID NO: 2674611 - RNA, 19 nt, Homo sapiens
  misc_RNA (1)...(19): siRNA sense strand
acucugagacugaggacca

SEQ ID NO: 2674612 - RNA, 19 nt, Homo sapiens
  misc_RNA (1)...(19): siRNA sense strand
gcaucauccgcaaggucaa

SEQ ID NO: 2674613 - RNA, 19 nt, Homo sapiens
  misc_RNA (1)...(19): siRNA sense strand
ucaaggagaagcuggccaa

SEQ ID NO: 2674614 - RNA, 19 nt, Homo sapiens
  misc_RNA (1)...(19): siRNA sense strand
uggcacaagcugagccuga

SEQ ID NO: 2674615 - RNA, 19 nt, Homo sapiens
  misc_RNA (1)...(19): siRNA sense strand
agaccaacaccgucaucaa

SEQ ID NO: 2674616 - RNA, 19 nt, Homo sapiens
  misc_RNA (1)...(19): siRNA sense strand
ggguaaugauggacuccca

SEQ ID NO: 2674617 - RNA, 19 nt, Homo sapiens
  misc_RNA (1)...(19): siRNA sense strand
gcaggaggagagugaacau

SEQ ID NO: 2674618 - RNA, 19 nt, Homo sapiens
  misc_RNA (1)...(19): siRNA sense strand
ugaggaaaucagagagaug

SEQ ID NO: 2674619 - RNA, 19 nt, Homo sapiens
  misc_RNA (1)...(19): siRNA sense strand
gcucagaguccugugggaa

SEQ ID NO: 2674620 - RNA, 19 nt, Homo sapiens
  misc_RNA (1)...(19): siRNA sense strand
agcucaaccucaagaccaa

SEQ ID NO: 2674621 - RNA, 19 nt, Homo sapiens
  misc_RNA (1)...(19): siRNA sense strand
ggcaugagaagauggccaa

SEQ ID NO: 2674622 - RNA, 19 nt, Homo sapiens
  misc_RNA (1)...(19): siRNA sense strand
cggcaggaggagagugaac

SEQ ID NO: 2674623 - RNA, 19 nt, Homo sapiens
  misc_RNA (1)...(19): siRNA sense strand
cugaagacucacugcuuau

SEQ ID NO: 2674624 - RNA, 19 nt, Homo sapiens
  misc_RNA (1)...(19): siRNA sense strand
ccgaggagaaggaggcacu

SEQ ID NO: 2674625 - RNA, 19 nt, Homo sapiens
  misc_RNA (1)...(19): siRNA sense strand
aggcagaggagaaaaucaa

SEQ ID NO: 2674626 - RNA, 19 nt, Homo sapiens
  misc_RNA (1)...(19): siRNA sense strand
agacaacaaucuagggcag

SEQ ID NO: 2674627 - RNA, 19 nt, Homo sapiens
  misc_RNA (1)...(19): siRNA sense strand
gggaggcagaggagaaaau

SEQ ID NO: 2674628 - RNA, 19 nt, Homo sapiens
  misc_RNA (1)...(19): siRNA sense strand
cggccuuggugaagcagga

SEQ ID NO: 2674629 - RNA, 19 nt, Homo sapiens
  misc_RNA (1)...(19): siRNA sense strand
gaccagaagccaaccguga

SEQ ID NO: 2674630 - RNA, 19 nt, Homo sapiens
  misc_RNA (1)...(19): siRNA sense strand
ggacaaggcccaagugagg

SEQ ID NO: 2674631 - RNA, 19 nt, Homo sapiens
  misc_RNA (1)...(19): siRNA sense strand
aggugguggcccuuaguaa

SEQ ID NO: 2674632 - RNA, 19 nt, Homo sapiens
  misc_RNA (1)...(19): siRNA sense strand
gugagaugcaggcgcaaca

SEQ ID NO: 2674633 - RNA, 19 nt, Homo sapiens
  misc_RNA (1)...(19): siRNA sense strand
ccgagcaguacgagcugua

SEQ ID NO: 2674634 - RNA, 19 nt, Homo sapiens
  misc_RNA (1)...(19): siRNA sense strand
ugacagaaaccuugcugca

SEQ ID NO: 2674635 - RNA, 19 nt, Homo sapiens
  misc_RNA (1)...(19): siRNA sense strand
guggaaagucuccgggaac

SEQ ID NO: 2674636 - RNA, 19 nt, Homo sapiens
  misc_RNA (1)...(19): siRNA sense strand
aggagaaccagcagccaga

SEQ ID NO: 2674637 - RNA, 19 nt, Homo sapiens
  misc_RNA (1)...(19): siRNA sense strand
ucacaugggagaacaggau

SEQ ID NO: 2674638 - RNA, 19 nt, Homo sapiens
  misc_RNA (1)...(19): siRNA sense strand
aggaagacgaguugggaua

SEQ ID NO: 2674639 - RNA, 19 nt, Homo sapiens
  misc_RNA (1)...(19): siRNA sense strand
ggaucaugcgcgugggaaa

SEQ ID NO: 2674640 - RNA, 19 nt, Homo sapiens
  misc_RNA (1)...(19): siRNA sense strand
ucagaaaagugguggcaua

SEQ ID NO: 2674641 - RNA, 19 nt, Homo sapiens
  misc_RNA (1)...(19): siRNA sense strand
cuacagaaguuaugggagu

SEQ ID NO: 2674642 - RNA, 19 nt, Homo sapiens
  misc_RNA (1)...(19): siRNA sense strand
gaacauaggcuguggugga

SEQ ID NO: 2674643 - RNA, 19 nt, Homo sapiens
  misc_RNA (1)...(19): siRNA sense strand
agaaagaagaaucgaaaga

SEQ ID NO: 2674644 - RNA, 19 nt, Homo sapiens
  misc_RNA (1)...(19): siRNA sense strand
acucaaacuuuaugcgcaa

SEQ ID NO: 2674645 - RNA, 19 nt, Homo sapiens
  misc_RNA (1)...(19): siRNA sense strand
uuacagaaagggagagaau

SEQ ID NO: 2674646 - RNA, 19 nt, Homo sapiens
  misc_RNA (1)...(19): siRNA sense strand
cgaaagaggaagacgaguu

SEQ ID NO: 2674647 - RNA, 19 nt, Homo sapiens
  misc_RNA (1)...(19): siRNA sense strand
agaaauacaagcaagcaaa

SEQ ID NO: 2674648 - RNA, 19 nt, Homo sapiens
  misc_RNA (1)...(19): siRNA sense strand
uugcaaagaguuauggaua

SEQ ID NO: 2674649 - RNA, 19 nt, Homo sapiens
  misc_RNA (1)...(19): siRNA sense strand
gugucuagcaguaggaaau

SEQ ID NO: 2674650 - RNA, 19 nt, Homo sapiens
  misc_RNA (1)...(19): siRNA sense strand
ggauagaacgcaagggaac

SEQ ID NO: 2674651 - RNA, 19 nt, Homo sapiens
  misc_RNA (1)...(19): siRNA sense strand
agauacaccaggacagaaa

SEQ ID NO: 2674652 - RNA, 19 nt, Homo sapiens
  misc_RNA (1)...(19): siRNA sense strand
ccgaggaaauuaaggacuu

SEQ ID NO: 2674653 - RNA, 19 nt, Homo sapiens
  misc_RNA (1)...(19): siRNA sense strand
cagcagaaagacaggaaaa

SEQ ID NO: 2674654 - RNA, 19 nt, Homo sapiens
  misc_RNA (1)...(19): siRNA sense strand
ggaagaaggacucugggaa

SEQ ID NO: 2674655 - RNA, 19 nt, Homo sapiens
  misc_RNA (1)...(19): siRNA sense strand
cagaaauacaagcaagcaa

SEQ ID NO: 2674656 - RNA, 19 nt, Homo sapiens
  misc_RNA (1)...(19): siRNA sense strand
agaagaaucgaaagaggaa

SEQ ID NO: 2674657 - RNA, 19 nt, Homo sapiens
  misc_RNA (1)...(19): siRNA sense strand
cuccagagcuccaggguga

SEQ ID NO: 2674658 - RNA, 19 nt, Homo sapiens
  misc_RNA (1)...(19): siRNA sense strand
ggaagauggauuaggaagu

SEQ ID NO: 2674659 - RNA, 19 nt, Homo sapiens
  misc_RNA (1)...(19): siRNA sense strand
gggugcaagcagauaauaa

SEQ ID NO: 2674660 - RNA, 19 nt, Homo sapiens
  misc_RNA (1)...(19): siRNA sense strand
gucccaagcccgaggaaau

SEQ ID NO: 2674661 - RNA, 19 nt, Homo sapiens
  misc_RNA (1)...(19): siRNA sense strand
ugcaaagaguuauggauau

SEQ ID NO: 2674662 - RNA, 19 nt, Homo sapiens
  misc_RNA (1)...(19): siRNA sense strand
aagaagagccugcuagcaa

SEQ ID NO: 2674663 - RNA, 19 nt, Homo sapiens
  misc_RNA (1)...(19): siRNA sense strand
augccaaaauggagguaaa

SEQ ID NO: 2674664 - RNA, 19 nt, Homo sapiens
  misc_RNA (1)...(19): siRNA sense strand
gauccaacccaaagaguca

SEQ ID NO: 2674665 - RNA, 19 nt, Homo sapiens
  misc_RNA (1)...(19): siRNA sense strand
caaacaagggacggagaaa

SEQ ID NO: 2674666 - RNA, 19 nt, Homo sapiens
  misc_RNA (1)...(19): siRNA sense strand
aaugauuacuggacggaau

SEQ ID NO: 2674667 - RNA, 19 nt, Homo sapiens
  misc_RNA (1)...(19): siRNA sense strand
caucgagucuggaaggaau

SEQ ID NO: 2674668 - RNA, 19 nt, Homo sapiens
  misc_RNA (1)...(19): siRNA sense strand
gcaaacaagggacggagaa

SEQ ID NO: 2674669 - RNA, 19 nt, Homo sapiens
  misc_RNA (1)...(19): siRNA sense strand
gcauuaggcaugauggaga

SEQ ID NO: 2674670 - RNA, 19 nt, Homo sapiens
  misc_RNA (1)...(19): siRNA sense strand
ccgcaaacuuggcuacaau

SEQ ID NO: 2674671 - RNA, 19 nt, Homo sapiens
  misc_RNA (1)...(19): siRNA sense strand
gugcauagggauuguccaa

SEQ ID NO: 2674672 - RNA, 19 nt, Homo sapiens
  misc_RNA (1)...(19): siRNA sense strand
gcauauuaaugacugggaa

SEQ ID NO: 2674673 - RNA, 19 nt, Homo sapiens
  misc_RNA (1)...(19): siRNA sense strand
caguaugguuucaacacaa

SEQ ID NO: 2674674 - RNA, 19 nt, Homo sapiens
  misc_RNA (1)...(19): siRNA sense strand
aguacaugcugcagacaau

SEQ ID NO: 2674675 - RNA, 19 nt, Homo sapiens
  misc_RNA (1)...(19): siRNA sense strand
caaugaaggaugagcaagu

SEQ ID NO: 2674676 - RNA, 19 nt, Homo sapiens
  misc_RNA (1)...(19): siRNA sense strand
guaaaguaucugcacguaa

SEQ ID NO: 2674677 - RNA, 19 nt, Homo sapiens
  misc_RNA (1)...(19): siRNA sense strand
cuucguuaggauugggaaa

SEQ ID NO: 2674678 - RNA, 19 nt, Homo sapiens
  misc_RNA (1)...(19): siRNA sense strand
aguaauuguuggugguguu

SEQ ID NO: 2674679 - RNA, 19 nt, Homo sapiens
  misc_RNA (1)...(19): siRNA sense strand
ggauaauuuaccugagcau

SEQ ID NO: 2674680 - RNA, 19 nt, Homo sapiens
  misc_RNA (1)...(19): siRNA sense strand
ugucaaaccagauugcaaa

SEQ ID NO: 2674681 - RNA, 19 nt, Homo sapiens
  misc_RNA (1)...(19): siRNA sense strand
uggaaguggaagauggauu

SEQ ID NO: 2674682 - RNA, 19 nt, Homo sapiens
  misc_RNA (1)...(19): siRNA sense strand
ccgcuguaccuguggguuu

SEQ ID NO: 2674683 - RNA, 19 nt, Homo sapiens
  misc_RNA (1)...(19): siRNA sense strand
gugugaaggacccaaguaa

SEQ ID NO: 2674684 - RNA, 19 nt, Homo sapiens
  misc_RNA (1)...(19): siRNA sense strand
acaacaaccuggagacagu

SEQ ID NO: 2674685 - RNA, 19 nt, Homo sapiens
  misc_RNA (1)...(19): siRNA sense strand
gagaaagauucccugaaaa

SEQ ID NO: 2674686 - RNA, 19 nt, Homo sapiens
  misc_RNA (1)...(19): siRNA sense strand
ugggaagaauucugauauu

SEQ ID NO: 2674687 - RNA, 19 nt, Homo sapiens
  misc_RNA (1)...(19): siRNA sense strand
guacaauuuuggagggcau

SEQ ID NO: 2674688 - RNA, 19 nt, Homo sapiens
  misc_RNA (1)...(19): siRNA sense strand
ccaaagagaucggggaaga

SEQ ID NO: 2674689 - RNA, 19 nt, Homo sapiens
  misc_RNA (1)...(19): siRNA sense strand
ccaaacaggucacggagga

SEQ ID NO: 2674690 - RNA, 19 nt, Homo sapiens
  misc_RNA (1)...(19): siRNA sense strand
aauuaugcauggagcaaga

SEQ ID NO: 2674691 - RNA, 19 nt, Homo sapiens
  misc_RNA (1)...(19): siRNA sense strand
aagaaucgaaagaggaaga

SEQ ID NO: 2674692 - RNA, 19 nt, Homo sapiens
  misc_RNA (1)...(19): siRNA sense strand
ccuuuauggaaauggacua

SEQ ID NO: 2674693 - RNA, 19 nt, Homo sapiens
  misc_RNA (1)...(19): siRNA sense strand
uugaagaugaguuggauau

SEQ ID NO: 2674694 - RNA, 19 nt, Homo sapiens
  misc_RNA (1)...(19): siRNA sense strand
gcgaggagaaugacaauca

SEQ ID NO: 2674695 - RNA, 19 nt, Homo sapiens
  misc_RNA (1)...(19): siRNA sense strand
gguauuagccagauaagca

SEQ ID NO: 2674696 - RNA, 19 nt, Homo sapiens
  misc_RNA (1)...(19): siRNA sense strand
ucaaaauggaaguggaaga

SEQ ID NO: 2674697 - RNA, 19 nt, Homo sapiens
  misc_RNA (1)...(19): siRNA sense strand
cggauagaacgcaagggaa

SEQ ID NO: 2674698 - RNA, 19 nt, Homo sapiens
  misc_RNA (1)...(19): siRNA sense strand
cuacagacaaucagcaaaa

SEQ ID NO: 2674699 - RNA, 19 nt, Homo sapiens
  misc_RNA (1)...(19): siRNA sense strand
agaaaguaauguaugcaca

SEQ ID NO: 2674700 - RNA, 19 nt, Homo sapiens
  misc_RNA (1)...(19): siRNA sense strand
acagaaagggagagaauag

SEQ ID NO: 2674701 - RNA, 19 nt, Homo sapiens
  misc_RNA (1)...(19): siRNA sense strand
ggaguggugcauagggauu

SEQ ID NO: 2674702 - RNA, 19 nt, Homo sapiens
  misc_RNA (1)...(19): siRNA sense strand
cugccaaagcugagaaucu

SEQ ID NO: 2674703 - RNA, 19 nt, Homo sapiens
  misc_RNA (1)...(19): siRNA sense strand
augaaaagccagucaacaa

SEQ ID NO: 2674704 - RNA, 19 nt, Homo sapiens
  misc_RNA (1)...(19): siRNA sense strand
ugaucaaugaggagcauau

SEQ ID NO: 2674705 - RNA, 19 nt, Homo sapiens
  misc_RNA (1)...(19): siRNA sense strand
uugaagauggugacauaaa

SEQ ID NO: 2674706 - RNA, 19 nt, Homo sapiens
  misc_RNA (1)...(19): siRNA sense strand
aggaagacgaguugggaua

SEQ ID NO: 2674707 - RNA, 19 nt, Homo sapiens
  misc_RNA (1)...(19): siRNA sense strand
ggaucaugcgcgugggaaa

SEQ ID NO: 2674708 - RNA, 19 nt, Homo sapiens
  misc_RNA (1)...(19): siRNA sense strand
ucagaaaagugguggcaua

SEQ ID NO: 2674709 - RNA, 19 nt, Homo sapiens
  misc_RNA (1)...(19): siRNA sense strand
cuacagaaguuaugggagu

SEQ ID NO: 2674710 - RNA, 19 nt, Homo sapiens
  misc_RNA (1)...(19): siRNA sense strand
gaacauaggcuguggugga

SEQ ID NO: 2674711 - RNA, 19 nt, Homo sapiens
  misc_RNA (1)...(19): siRNA sense strand
agaaagaagaaucgaaaga

SEQ ID NO: 2674712 - RNA, 19 nt, Homo sapiens
  misc_RNA (1)...(19): siRNA sense strand
acucaaacuuuaugcgcaa

SEQ ID NO: 2674713 - RNA, 19 nt, Homo sapiens
  misc_RNA (1)...(19): siRNA sense strand
uuacagaaagggagagaau

SEQ ID NO: 2674714 - RNA, 19 nt, Homo sapiens
  misc_RNA (1)...(19): siRNA sense strand
cgaaagaggaagacgaguu

SEQ ID NO: 2674715 - RNA, 19 nt, Homo sapiens
  misc_RNA (1)...(19): siRNA sense strand
agaaauacaagcaagcaaa

SEQ ID NO: 2674716 - RNA, 19 nt, Homo sapiens
  misc_RNA (1)...(19): siRNA sense strand
uugcaaagaguuauggaua

SEQ ID NO: 2674717 - RNA, 19 nt, Homo sapiens
  misc_RNA (1)...(19): siRNA sense strand
gugucuagcaguaggaaau

SEQ ID NO: 2674718 - RNA, 19 nt, Homo sapiens
  misc_RNA (1)...(19): siRNA sense strand
ggauagaacgcaagggaac

SEQ ID NO: 2674719 - RNA, 19 nt, Homo sapiens
  misc_RNA (1)...(19): siRNA sense strand
agauacaccaggacagaaa

SEQ ID NO: 2674720 - RNA, 19 nt, Homo sapiens
  misc_RNA (1)...(19): siRNA sense strand
ccgaggaaauuaaggacuu

SEQ ID NO: 2674721 - RNA, 19 nt, Homo sapiens
  misc_RNA (1)...(19): siRNA sense strand
cagcagaaagacaggaaaa

SEQ ID NO: 2674722 - RNA, 19 nt, Homo sapiens
  misc_RNA (1)...(19): siRNA sense strand
ggaagaaggacucugggaa

SEQ ID NO: 2674723 - RNA, 19 nt, Homo sapiens
  misc_RNA (1)...(19): siRNA sense strand
cagaaauacaagcaagcaa

SEQ ID NO: 2674724 - RNA, 19 nt, Homo sapiens
  misc_RNA (1)...(19): siRNA sense strand
agaagaaucgaaagaggaa

SEQ ID NO: 2674725 - RNA, 19 nt, Homo sapiens
  misc_RNA (1)...(19): siRNA sense strand
cuccagagcuccaggguga

SEQ ID NO: 2674726 - RNA, 19 nt, Homo sapiens
  misc_RNA (1)...(19): siRNA sense strand
ggaagauggauuaggaagu

SEQ ID NO: 2674727 - RNA, 19 nt, Homo sapiens
  misc_RNA (1)...(19): siRNA sense strand
gggugcaagcagauaauaa

SEQ ID NO: 2674728 - RNA, 19 nt, Homo sapiens
  misc_RNA (1)...(19): siRNA sense strand
gucccaagcccgaggaaau

SEQ ID NO: 2674729 - RNA, 19 nt, Homo sapiens
  misc_RNA (1)...(19): siRNA sense strand
ugcaaagaguuauggauau

SEQ ID NO: 2674730 - RNA, 19 nt, Homo sapiens
  misc_RNA (1)...(19): siRNA sense strand
aagaagagccugcuagcaa

SEQ ID NO: 2674731 - RNA, 19 nt, Homo sapiens
  misc_RNA (1)...(19): siRNA sense strand
augccaaaauggagguaaa

SEQ ID NO: 2674732 - RNA, 19 nt, Homo sapiens
  misc_RNA (1)...(19): siRNA sense strand
gauccaacccaaagaguca

SEQ ID NO: 2674733 - RNA, 19 nt, Homo sapiens
  misc_RNA (1)...(19): siRNA sense strand
caaacaagggacggagaaa

SEQ ID NO: 2674734 - RNA, 19 nt, Homo sapiens
  misc_RNA (1)...(19): siRNA sense strand
aaugauuacuggacggaau

SEQ ID NO: 2674735 - RNA, 19 nt, Homo sapiens
  misc_RNA (1)...(19): siRNA sense strand
caucgagucuggaaggaau

SEQ ID NO: 2674736 - RNA, 19 nt, Homo sapiens
  misc_RNA (1)...(19): siRNA sense strand
gcaaacaagggacggagaa

SEQ ID NO: 2674737 - RNA, 19 nt, Homo sapiens
  misc_RNA (1)...(19): siRNA sense strand
gcauuaggcaugauggaga

SEQ ID NO: 2674738 - RNA, 19 nt, Homo sapiens
  misc_RNA (1)...(19): siRNA sense strand
ccgcaaacuuggcuacaau

SEQ ID NO: 2674739 - RNA, 19 nt, Homo sapiens
  misc_RNA (1)...(19): siRNA sense strand
gugcauagggauuguccaa

SEQ ID NO: 2674740 - RNA, 19 nt, Homo sapiens
  misc_RNA (1)...(19): siRNA sense strand
gcauauuaaugacugggaa

SEQ ID NO: 2674741 - RNA, 19 nt, Homo sapiens
  misc_RNA (1)...(19): siRNA sense strand
caguaugguuucaacacaa

SEQ ID NO: 2674742 - RNA, 19 nt, Homo sapiens
  misc_RNA (1)...(19): siRNA sense strand
aguacaugcugcagacaau

SEQ ID NO: 2674743 - RNA, 19 nt, Homo sapiens
  misc_RNA (1)...(19): siRNA sense strand
caaugaaggaugagcaagu

SEQ ID NO: 2674744 - RNA, 19 nt, Homo sapiens
  misc_RNA (1)...(19): siRNA sense strand
guaaaguaucugcacguaa

SEQ ID NO: 2674745 - RNA, 19 nt, Homo sapiens
  misc_RNA (1)...(19): siRNA sense strand
cuucguuaggauugggaaa

SEQ ID NO: 2674746 - RNA, 19 nt, Homo sapiens
  misc_RNA (1)...(19): siRNA sense strand
aguaauuguuggugguguu

SEQ ID NO: 2674747 - RNA, 19 nt, Homo sapiens
  misc_RNA (1)...(19): siRNA sense strand
ggauaauuuaccugagcau

SEQ ID NO: 2674748 - RNA, 19 nt, Homo sapiens
  misc_RNA (1)...(19): siRNA sense strand
ugucaaaccagauugcaaa

SEQ ID NO: 2674749 - RNA, 19 nt, Homo sapiens
  misc_RNA (1)...(19): siRNA sense strand
uggaaguggaagauggauu

SEQ ID NO: 2674750 - RNA, 19 nt, Homo sapiens
  misc_RNA (1)...(19): siRNA sense strand
ccgcuguaccuguggguuu

SEQ ID NO: 2674751 - RNA, 19 nt, Homo sapiens
  misc_RNA (1)...(19): siRNA sense strand
gugugaaggacccaaguaa

SEQ ID NO: 2674752 - RNA, 19 nt, Homo sapiens
  misc_RNA (1)...(19): siRNA sense strand
acaacaaccuggagacagu

SEQ ID NO: 2674753 - RNA, 19 nt, Homo sapiens
  misc_RNA (1)...(19): siRNA sense strand
gagaaagauucccugaaaa

SEQ ID NO: 2674754 - RNA, 19 nt, Homo sapiens
  misc_RNA (1)...(19): siRNA sense strand
ugggaagaauucugauauu

SEQ ID NO: 2674755 - RNA, 19 nt, Homo sapiens
  misc_RNA (1)...(19): siRNA sense strand
guacaauuuuggagggcau

SEQ ID NO: 2674756 - RNA, 19 nt, Homo sapiens
  misc_RNA (1)...(19): siRNA sense strand
ccaaagagaucggggaaga

SEQ ID NO: 2674757 - RNA, 19 nt, Homo sapiens
  misc_RNA (1)...(19): siRNA sense strand
ccaaacaggucacggagga

SEQ ID NO: 2674758 - RNA, 19 nt, Homo sapiens
  misc_RNA (1)...(19): siRNA sense strand
aauuaugcauggagcaaga

SEQ ID NO: 2674759 - RNA, 19 nt, Homo sapiens
  misc_RNA (1)...(19): siRNA sense strand
aagaaucgaaagaggaaga

SEQ ID NO: 2674760 - RNA, 19 nt, Homo sapiens
  misc_RNA (1)...(19): siRNA sense strand
ccuuuauggaaauggacua

SEQ ID NO: 2674761 - RNA, 19 nt, Homo sapiens
  misc_RNA (1)...(19): siRNA sense strand
uugaagaugaguuggauau

SEQ ID NO: 2674762 - RNA, 19 nt, Homo sapiens
  misc_RNA (1)...(19): siRNA sense strand
gcgaggagaaugacaauca

SEQ ID NO: 2674763 - RNA, 19 nt, Homo sapiens
  misc_RNA (1)...(19): siRNA sense strand
gguauuagccagauaagca

SEQ ID NO: 2674764 - RNA, 19 nt, Homo sapiens
  misc_RNA (1)...(19): siRNA sense strand
ucaaaauggaaguggaaga

SEQ ID NO: 2674765 - RNA, 19 nt, Homo sapiens
  misc_RNA (1)...(19): siRNA sense strand
cggauagaacgcaagggaa

SEQ ID NO: 2674766 - RNA, 19 nt, Homo sapiens
  misc_RNA (1)...(19): siRNA sense strand
cuacagacaaucagcaaaa

SEQ ID NO: 2674767 - RNA, 19 nt, Homo sapiens
  misc_RNA (1)...(19): siRNA sense strand
agaaaguaauguaugcaca

SEQ ID NO: 2674768 - RNA, 19 nt, Homo sapiens
  misc_RNA (1)...(19): siRNA sense strand
acagaaagggagagaauag

SEQ ID NO: 2674769 - RNA, 19 nt, Homo sapiens
  misc_RNA (1)...(19): siRNA sense strand
ggaguggugcauagggauu

SEQ ID NO: 2674770 - RNA, 19 nt, Homo sapiens
  misc_RNA (1)...(19): siRNA sense strand
cugccaaagcugagaaucu

SEQ ID NO: 2674771 - RNA, 19 nt, Homo sapiens
  misc_RNA (1)...(19): siRNA sense strand
augaaaagccagucaacaa

SEQ ID NO: 2674772 - RNA, 19 nt, Homo sapiens
  misc_RNA (1)...(19): siRNA sense strand
ugaucaaugaggagcauau

SEQ ID NO: 2674773 - RNA, 19 nt, Homo sapiens
  misc_RNA (1)...(19): siRNA sense strand
uugaagauggugacauaaa

SEQ ID NO: 2674774 - RNA, 19 nt, Homo sapiens
  misc_RNA (1)...(19): siRNA sense strand
acuuagagcaagagaaaca

SEQ ID NO: 2674775 - RNA, 19 nt, Homo sapiens
  misc_RNA (1)...(19): siRNA sense strand
agagaagacuuucgggaga

SEQ ID NO: 2674776 - RNA, 19 nt, Homo sapiens
  misc_RNA (1)...(19): siRNA sense strand
aggaugaguuggagaggca

SEQ ID NO: 2674777 - RNA, 19 nt, Homo sapiens
  misc_RNA (1)...(19): siRNA sense strand
ggaacagaaccaaaggcua

SEQ ID NO: 2674778 - RNA, 19 nt, Homo sapiens
  misc_RNA (1)...(19): siRNA sense strand
cgacagaaggagaaggauc

SEQ ID NO: 2674779 - RNA, 19 nt, Homo sapiens
  misc_RNA (1)...(19): siRNA sense strand
cgggaagcagaucgagaaa

SEQ ID NO: 2674780 - RNA, 19 nt, Homo sapiens
  misc_RNA (1)...(19): siRNA sense strand
aggcgcugcucgagaggaa

SEQ ID NO: 2674781 - RNA, 19 nt, Homo sapiens
  misc_RNA (1)...(19): siRNA sense strand
aggugaagguggaagaacu

SEQ ID NO: 2674782 - RNA, 19 nt, Homo sapiens
  misc_RNA (1)...(19): siRNA sense strand
cccuaaaagaggagagaga

SEQ ID NO: 2674783 - RNA, 19 nt, Homo sapiens
  misc_RNA (1)...(19): siRNA sense strand
gcgcuacuuuagaggaaaa

SEQ ID NO: 2674784 - RNA, 19 nt, Homo sapiens
  misc_RNA (1)...(19): siRNA sense strand
cugaggagcuggagcagga

SEQ ID NO: 2674785 - RNA, 19 nt, Homo sapiens
  misc_RNA (1)...(19): siRNA sense strand
gagcaucgucucagcgcua

SEQ ID NO: 2674786 - RNA, 19 nt, Homo sapiens
  misc_RNA (1)...(19): siRNA sense strand
cugaggacaaggagccaaa

SEQ ID NO: 2674787 - RNA, 19 nt, Homo sapiens
  misc_RNA (1)...(19): siRNA sense strand
caguacgagcagaugcaua

SEQ ID NO: 2674788 - RNA, 19 nt, Homo sapiens
  misc_RNA (1)...(19): siRNA sense strand
gcauggaggcugaggagcu

SEQ ID NO: 2674789 - RNA, 19 nt, Homo sapiens
  misc_RNA (1)...(19): siRNA sense strand
ggaccguggaggagcuaca

SEQ ID NO: 2674790 - RNA, 19 nt, Homo sapiens
  misc_RNA (1)...(19): siRNA sense strand
acaaggagccaaaggagca

SEQ ID NO: 2674791 - RNA, 19 nt, Homo sapiens
  misc_RNA (1)...(19): siRNA sense strand
aggccauugcaaagaagaa

SEQ ID NO: 2674792 - RNA, 19 nt, Homo sapiens
  misc_RNA (1)...(19): siRNA sense strand
auggacgagucuucagaaa

SEQ ID NO: 2674793 - RNA, 19 nt, Homo sapiens
  misc_RNA (1)...(19): siRNA sense strand
aggagaaggaucugguguu

SEQ ID NO: 2674794 - RNA, 19 nt, Homo sapiens
  misc_RNA (1)...(19): siRNA sense strand
cagagaucgagcagagcau

SEQ ID NO: 2674795 - RNA, 19 nt, Homo sapiens
  misc_RNA (1)...(19): siRNA sense strand
agagacugauacagagcau

SEQ ID NO: 2674796 - RNA, 19 nt, Homo sapiens
  misc_RNA (1)...(19): siRNA sense strand
gagucacuucugaggacaa

SEQ ID NO: 2674797 - RNA, 19 nt, Homo sapiens
  misc_RNA (1)...(19): siRNA sense strand
ggaaacgggagcuggagca

SEQ ID NO: 2674798 - RNA, 19 nt, Homo sapiens
  misc_RNA (1)...(19): siRNA sense strand
agcaagagaaacaugaauu

SEQ ID NO: 2674799 - RNA, 19 nt, Homo sapiens
  misc_RNA (1)...(19): siRNA sense strand
cuacaggaugaguuggaga

SEQ ID NO: 2674800 - RNA, 19 nt, Homo sapiens
  misc_RNA (1)...(19): siRNA sense strand
ugucagagaucgagcagag

SEQ ID NO: 2674801 - RNA, 19 nt, Homo sapiens
  misc_RNA (1)...(19): siRNA sense strand
gauacagagcauuguggau

SEQ ID NO: 2674802 - RNA, 19 nt, Homo sapiens
  misc_RNA (1)...(19): siRNA sense strand
ugcuaauccuggagaggca

SEQ ID NO: 2674803 - RNA, 19 nt, Homo sapiens
  misc_RNA (1)...(19): siRNA sense strand
ucagaaaccucguccgcca

SEQ ID NO: 2674804 - RNA, 19 nt, Homo sapiens
  misc_RNA (1)...(19): siRNA sense strand
agccaaaggagcagcuuca

SEQ ID NO: 2674805 - RNA, 19 nt, Homo sapiens
  misc_RNA (1)...(19): siRNA sense strand
gagggcagguuguugguga

SEQ ID NO: 2674806 - RNA, 19 nt, Homo sapiens
  misc_RNA (1)...(19): siRNA sense strand
ccgaaguaccuguuggaua

SEQ ID NO: 2674807 - RNA, 19 nt, Homo sapiens
  misc_RNA (1)...(19): siRNA sense strand
acaugaagcgagagaacaa

SEQ ID NO: 2674808 - RNA, 19 nt, Homo sapiens
  misc_RNA (1)...(19): siRNA sense strand
agaaugaguuugugcguga

SEQ ID NO: 2674809 - RNA, 19 nt, Homo sapiens
  misc_RNA (1)...(19): siRNA sense strand
ucauagggaacgagagcaa

SEQ ID NO: 2674810 - RNA, 19 nt, Homo sapiens
  misc_RNA (1)...(19): siRNA sense strand
gggccauggugaagggcau

SEQ ID NO: 2674811 - RNA, 19 nt, Homo sapiens
  misc_RNA (1)...(19): siRNA sense strand
acugaggaguccagagaau

SEQ ID NO: 2674812 - RNA, 19 nt, Homo sapiens
  misc_RNA (1)...(19): siRNA sense strand
acaaguacgcagagcgcaa

SEQ ID NO: 2674813 - RNA, 19 nt, Homo sapiens
  misc_RNA (1)...(19): siRNA sense strand
ggguggagaaguuggagaa

SEQ ID NO: 2674814 - RNA, 19 nt, Homo sapiens
  misc_RNA (1)...(19): siRNA sense strand
agcugaaggaggagauaaa

SEQ ID NO: 2674815 - RNA, 19 nt, Homo sapiens
  misc_RNA (1)...(19): siRNA sense strand
ugggagaucuugugcggaa

SEQ ID NO: 2674816 - RNA, 19 nt, Homo sapiens
  misc_RNA (1)...(19): siRNA sense strand
gaacaguacuugucagcca

SEQ ID NO: 2674817 - RNA, 19 nt, Homo sapiens
  misc_RNA (1)...(19): siRNA sense strand
guugauuguggaugagaaa

SEQ ID NO: 2674818 - RNA, 19 nt, Homo sapiens
  misc_RNA (1)...(19): siRNA sense strand
gagaaguugaugccagaaa

SEQ ID NO: 2674819 - RNA, 19 nt, Homo sapiens
  misc_RNA (1)...(19): siRNA sense strand
acucagaauuuaaggaucu

SEQ ID NO: 2674820 - RNA, 19 nt, Homo sapiens
  misc_RNA (1)...(19): siRNA sense strand
uggccaagcaccuggacaa

SEQ ID NO: 2674821 - RNA, 19 nt, Homo sapiens
  misc_RNA (1)...(19): siRNA sense strand
ggaggaugcuggagggaug

SEQ ID NO: 2674822 - RNA, 19 nt, Homo sapiens
  misc_RNA (1)...(19): siRNA sense strand
uugacaacaccaaggauaa

SEQ ID NO: 2674823 - RNA, 19 nt, Homo sapiens
  misc_RNA (1)...(19): siRNA sense strand
ugacagaccagaaggacuu

SEQ ID NO: 2674824 - RNA, 19 nt, Homo sapiens
  misc_RNA (1)...(19): siRNA sense strand
gagaacgauugcagcgaga

SEQ ID NO: 2674825 - RNA, 19 nt, Homo sapiens
  misc_RNA (1)...(19): siRNA sense strand
ggaaguuaggggagaaaau

SEQ ID NO: 2674826 - RNA, 19 nt, Homo sapiens
  misc_RNA (1)...(19): siRNA sense strand
aggagauaaagaagaagaa

SEQ ID NO: 2674827 - RNA, 19 nt, Homo sapiens
  misc_RNA (1)...(19): siRNA sense strand
gcaucaaagaggaggugca

SEQ ID NO: 2674828 - RNA, 19 nt, Homo sapiens
  misc_RNA (1)...(19): siRNA sense strand
gugacaacagccaguguaa

SEQ ID NO: 2674829 - RNA, 19 nt, Homo sapiens
  misc_RNA (1)...(19): siRNA sense strand
aggccaacaugaagcgaga

SEQ ID NO: 2674830 - RNA, 19 nt, Homo sapiens
  misc_RNA (1)...(19): siRNA sense strand
caacaugaagcgagagaac

SEQ ID NO: 2674831 - RNA, 19 nt, Homo sapiens
  misc_RNA (1)...(19): siRNA sense strand
gcuaugaugcugugcgaca

SEQ ID NO: 2674832 - RNA, 19 nt, Homo sapiens
  misc_RNA (1)...(19): siRNA sense strand
gaauguggcuccuggcaga

SEQ ID NO: 2674833 - RNA, 19 nt, Homo sapiens
  misc_RNA (1)...(19): siRNA sense strand
guguaaaggaacggagaga

SEQ ID NO: 2674834 - RNA, 19 nt, Homo sapiens
  misc_RNA (1)...(19): siRNA sense strand
cugagaaauuccuggucau

SEQ ID NO: 2674835 - RNA, 19 nt, Homo sapiens
  misc_RNA (1)...(19): siRNA sense strand
cagcgagaacauugggaga

SEQ ID NO: 2674836 - RNA, 19 nt, Homo sapiens
  misc_RNA (1)...(19): siRNA sense strand
gaggagauaaagaagaaga

SEQ ID NO: 2674837 - RNA, 19 nt, Homo sapiens
  misc_RNA (1)...(19): siRNA sense strand
gagauaaagaagaagaaag

SEQ ID NO: 2674838 - RNA, 19 nt, Homo sapiens
  misc_RNA (1)...(19): siRNA sense strand
gcucaacacucaugggaag

SEQ ID NO: 2674839 - RNA, 19 nt, Homo sapiens
  misc_RNA (1)...(19): siRNA sense strand
gagccaagcgacaaggaga

SEQ ID NO: 2674840 - RNA, 19 nt, Homo sapiens
  misc_RNA (1)...(19): siRNA sense strand
ccauggaaucccugaccaa

SEQ ID NO: 2674841 - RNA, 19 nt, Homo sapiens
  misc_RNA (1)...(19): siRNA sense strand
auaaagaagaagaaaggca

SEQ ID NO: 2674842 - RNA, 19 nt, Homo sapiens
  misc_RNA (1)...(19): siRNA sense strand
ccagcaagcagaaggagau

SEQ ID NO: 2674843 - RNA, 19 nt, Homo sapiens
  misc_RNA (1)...(19): siRNA sense strand
ccauccaagauaagaagaa

SEQ ID NO: 2674844 - RNA, 19 nt, Homo sapiens
  misc_RNA (1)...(19): siRNA sense strand
agucauggcuauuaagagu

SEQ ID NO: 2674845 - RNA, 19 nt, Homo sapiens
  misc_RNA (1)...(19): siRNA sense strand
ugaaaggacuggcugguca

SEQ ID NO: 2674846 - RNA, 19 nt, Homo sapiens
  misc_RNA (1)...(19): siRNA sense strand
uggagaaguugaugccaga

SEQ ID NO: 2674847 - RNA, 19 nt, Homo sapiens
  misc_RNA (1)...(19): siRNA sense strand
ugggacacgaugaggacaa

SEQ ID NO: 2674848 - RNA, 19 nt, Homo sapiens
  misc_RNA (1)...(19): siRNA sense strand
guuuggaggugcugaacga

SEQ ID NO: 2674849 - RNA, 19 nt, Homo sapiens
  misc_RNA (1)...(19): siRNA sense strand
gaaguguguugcuggaaaa

SEQ ID NO: 2674850 - RNA, 19 nt, Homo sapiens
  misc_RNA (1)...(19): siRNA sense strand
ugccagggcucaaggguga

SEQ ID NO: 2674851 - RNA, 19 nt, Homo sapiens
  misc_RNA (1)...(19): siRNA sense strand
agaagaaaggcaucaaaga

SEQ ID NO: 2674852 - RNA, 19 nt, Homo sapiens
  misc_RNA (1)...(19): siRNA sense strand
cagcagcaguggugaugau

SEQ ID NO: 2674853 - RNA, 19 nt, Homo sapiens
  misc_RNA (1)...(19): siRNA sense strand
ugauugacgacgugaucua

SEQ ID NO: 2674854 - RNA, 19 nt, Homo sapiens
  misc_RNA (1)...(19): siRNA sense strand
uugacaaggaggaggagau

SEQ ID NO: 2674855 - RNA, 19 nt, Homo sapiens
  misc_RNA (1)...(19): siRNA sense strand
ugaaugggaucguggcuga

SEQ ID NO: 2674856 - RNA, 19 nt, Homo sapiens
  misc_RNA (1)...(19): siRNA sense strand
aggaggaggaggaguggau

SEQ ID NO: 2674857 - RNA, 19 nt, Homo sapiens
  misc_RNA (1)...(19): siRNA sense strand
ggaugauaacuuuggaacu

SEQ ID NO: 2674858 - RNA, 19 nt, Homo sapiens
  misc_RNA (1)...(19): siRNA sense strand
cagaugagcagcuggagau

SEQ ID NO: 2674859 - RNA, 19 nt, Homo sapiens
  misc_RNA (1)...(19): siRNA sense strand
caucgagagccaagcgaca

SEQ ID NO: 2674860 - RNA, 19 nt, Homo sapiens
  misc_RNA (1)...(19): siRNA sense strand
acgaagcuguggaaagaga

SEQ ID NO: 2674861 - RNA, 19 nt, Homo sapiens
  misc_RNA (1)...(19): siRNA sense strand
agauggacguggucaguca

SEQ ID NO: 2674862 - RNA, 19 nt, Homo sapiens
  misc_RNA (1)...(19): siRNA sense strand
gcgagagaacaaagcuuau

SEQ ID NO: 2674863 - RNA, 19 nt, Homo sapiens
  misc_RNA (1)...(19): siRNA sense strand
cugaaggaggagauaaaga

SEQ ID NO: 2674864 - RNA, 19 nt, Homo sapiens
  misc_RNA (1)...(19): siRNA sense strand
gaggaaucguggcggacca

SEQ ID NO: 2674865 - RNA, 19 nt, Homo sapiens
  misc_RNA (1)...(19): siRNA sense strand
ucggaggcucggaaggaaa

SEQ ID NO: 2674866 - RNA, 19 nt, Homo sapiens
  misc_RNA (1)...(19): siRNA sense strand
gaacaaagcuuauuccuuc

SEQ ID NO: 2674867 - RNA, 19 nt, Homo sapiens
  misc_RNA (1)...(19): siRNA sense strand
ggacagguucagcuggaau

SEQ ID NO: 2674868 - RNA, 19 nt, Homo sapiens
  misc_RNA (1)...(19): siRNA sense strand
gagagaaauccucagugaa

SEQ ID NO: 2674869 - RNA, 19 nt, Homo sapiens
  misc_RNA (1)...(19): siRNA sense strand
ccuucaaagagcagaucau

SEQ ID NO: 2674870 - RNA, 19 nt, Homo sapiens
  misc_RNA (1)...(19): siRNA sense strand
ucggauagaagauggcaaa

SEQ ID NO: 2674871 - RNA, 19 nt, Homo sapiens
  misc_RNA (1)...(19): siRNA sense strand
ggaacugacuggagauucu

SEQ ID NO: 2674872 - RNA, 19 nt, Homo sapiens
  misc_RNA (1)...(19): siRNA sense strand
gugaggaagacaagugaca

SEQ ID NO: 2674873 - RNA, 19 nt, Homo sapiens
  misc_RNA (1)...(19): siRNA sense strand
gccaaugagaucuggguga

SEQ ID NO: 2674874 - RNA, 19 nt, Homo sapiens
  misc_RNA (1)...(19): siRNA sense strand
gagauucuauggaggugaa

SEQ ID NO: 2674875 - RNA, 19 nt, Homo sapiens
  misc_RNA (1)...(19): siRNA sense strand
ccagacaagaggaggaaac

SEQ ID NO: 2674876 - RNA, 19 nt, Homo sapiens
  misc_RNA (1)...(19): siRNA sense strand
caauggaacugacuggaga

SEQ ID NO: 2674877 - RNA, 19 nt, Homo sapiens
  misc_RNA (1)...(19): siRNA sense strand
gagaucugggugaggaaga

SEQ ID NO: 2674878 - RNA, 19 nt, Homo sapiens
  misc_RNA (1)...(19): siRNA sense strand
ccagcuaaacuauuuguua

SEQ ID NO: 2674879 - RNA, 19 nt, Homo sapiens
  misc_RNA (1)...(19): siRNA sense strand
gaaaaugaaaagcugacaa

SEQ ID NO: 2674880 - RNA, 19 nt, Homo sapiens
  misc_RNA (1)...(19): siRNA sense strand
auggaggaucugagaacau

SEQ ID NO: 2674881 - RNA, 19 nt, Homo sapiens
  misc_RNA (1)...(19): siRNA sense strand
ucggauagaagauggcaaa

SEQ ID NO: 2674882 - RNA, 19 nt, Homo sapiens
  misc_RNA (1)...(19): siRNA sense strand
ggaacugacuggagauucu

SEQ ID NO: 2674883 - RNA, 19 nt, Homo sapiens
  misc_RNA (1)...(19): siRNA sense strand
uugcugagcuagaagaaaa

SEQ ID NO: 2674884 - RNA, 19 nt, Homo sapiens
  misc_RNA (1)...(19): siRNA sense strand
gugaggaagacaagugaca

SEQ ID NO: 2674885 - RNA, 19 nt, Homo sapiens
  misc_RNA (1)...(19): siRNA sense strand
cagugaaagaauuugaaga

SEQ ID NO: 2674886 - RNA, 19 nt, Homo sapiens
  misc_RNA (1)...(19): siRNA sense strand
gccaaugagaucuggguga

SEQ ID NO: 2674887 - RNA, 19 nt, Homo sapiens
  misc_RNA (1)...(19): siRNA sense strand
gagauucuauggaggugaa

SEQ ID NO: 2674888 - RNA, 19 nt, Homo sapiens
  misc_RNA (1)...(19): siRNA sense strand
ccagacaagaggaggaaac

SEQ ID NO: 2674889 - RNA, 19 nt, Homo sapiens
  misc_RNA (1)...(19): siRNA sense strand
caauggaacugacuggaga

SEQ ID NO: 2674890 - RNA, 19 nt, Homo sapiens
  misc_RNA (1)...(19): siRNA sense strand
agaaggcagcagugaaaga

SEQ ID NO: 2674891 - RNA, 19 nt, Homo sapiens
  misc_RNA (1)...(19): siRNA sense strand
gagaucugggugaggaaga

SEQ ID NO: 2674892 - RNA, 19 nt, Homo sapiens
  misc_RNA (1)...(19): siRNA sense strand
ccagcuaaacuauuuguua

SEQ ID NO: 2674893 - RNA, 19 nt, Homo sapiens
  misc_RNA (1)...(19): siRNA sense strand
gaaaaugaaaagcugacaa

SEQ ID NO: 2674894 - RNA, 19 nt, Homo sapiens
  misc_RNA (1)...(19): siRNA sense strand
uugaagacaagaagguuga

SEQ ID NO: 2674895 - RNA, 19 nt, Homo sapiens
  misc_RNA (1)...(19): siRNA sense strand
auggaggaucugagaacau

SEQ ID NO: 2674896 - RNA, 19 nt, Homo sapiens
  misc_RNA (1)...(19): siRNA sense strand
ucagaaaguuugagcgaga

SEQ ID NO: 2674897 - RNA, 19 nt, Homo sapiens
  misc_RNA (1)...(19): siRNA sense strand
ggacagaccugcagaagca

SEQ ID NO: 2674898 - RNA, 19 nt, Homo sapiens
  misc_RNA (1)...(19): siRNA sense strand
guggagaacuuuaagaaga

SEQ ID NO: 2674899 - RNA, 19 nt, Homo sapiens
  misc_RNA (1)...(19): siRNA sense strand
uggaaaagguggaugagaa

SEQ ID NO: 2674900 - RNA, 19 nt, Homo sapiens
  misc_RNA (1)...(19): siRNA sense strand
gggcauuugugaagagagu

SEQ ID NO: 2674901 - RNA, 19 nt, Homo sapiens
  misc_RNA (1)...(19): siRNA sense strand
ucagugagcugguggagaa

SEQ ID NO: 2674902 - RNA, 19 nt, Homo sapiens
  misc_RNA (1)...(19): siRNA sense strand
aggagaugcucaugggaga

SEQ ID NO: 2674903 - RNA, 19 nt, Homo sapiens
  misc_RNA (1)...(19): siRNA sense strand
aagaagaccuugagccaca

SEQ ID NO: 2674904 - RNA, 19 nt, Homo sapiens
  misc_RNA (1)...(19): siRNA sense strand
gcccaacauucaagaaauu

SEQ ID NO: 2674905 - RNA, 19 nt, Homo sapiens
  misc_RNA (1)...(19): siRNA sense strand
gcugaugcacauacagaaa

SEQ ID NO: 2674906 - RNA, 19 nt, Homo sapiens
  misc_RNA (1)...(19): siRNA sense strand
gccuaaugcuggaagacuu

SEQ ID NO: 2674907 - RNA, 19 nt, Homo sapiens
  misc_RNA (1)...(19): siRNA sense strand
caucagaaaguuugagcga

SEQ ID NO: 2674908 - RNA, 19 nt, Homo sapiens
  misc_RNA (1)...(19): siRNA sense strand
gcauuugugaagagaguca

SEQ ID NO: 2674909 - RNA, 19 nt, Homo sapiens
  misc_RNA (1)...(19): siRNA sense strand
cagaggacuccaucagaaa

SEQ ID NO: 2674910 - RNA, 19 nt, Homo sapiens
  misc_RNA (1)...(19): siRNA sense strand
gcuacaaccugcuggaugu

SEQ ID NO: 2674911 - RNA, 19 nt, Homo sapiens
  misc_RNA (1)...(19): siRNA sense strand
guucagacuucuugaguuc

SEQ ID NO: 2674912 - RNA, 19 nt, Homo sapiens
  misc_RNA (1)...(19): siRNA sense strand
gaugaugaaugucgggcau

SEQ ID NO: 2674913 - RNA, 19 nt, Homo sapiens
  misc_RNA (1)...(19): siRNA sense strand
ugcagaagcaguuggacaa

SEQ ID NO: 2674914 - RNA, 19 nt, Homo sapiens
  misc_RNA (1)...(19): siRNA sense strand
ccaugaaggucuaugugga

SEQ ID NO: 2674915 - RNA, 19 nt, Homo sapiens
  misc_RNA (1)...(19): siRNA sense strand
ccucaagcuuaucggcuau

SEQ ID NO: 2674916 - RNA, 19 nt, Homo sapiens
  misc_RNA (1)...(19): siRNA sense strand
acacuacaucggugggauu

SEQ ID NO: 2674917 - RNA, 19 nt, Homo sapiens
  misc_RNA (1)...(19): siRNA sense strand
gugagcugguggagaacuu

SEQ ID NO: 2674918 - RNA, 19 nt, Homo sapiens
  misc_RNA (1)...(19): siRNA sense strand
ucaacauguucgugggugu

SEQ ID NO: 2674919 - RNA, 19 nt, Homo sapiens
  misc_RNA (1)...(19): siRNA sense strand
uuaagaagaccuugagcca

SEQ ID NO: 2674920 - RNA, 19 nt, Homo sapiens
  misc_RNA (1)...(19): siRNA sense strand
gaggaacgaugaugaaugu

SEQ ID NO: 2674921 - RNA, 19 nt, Homo sapiens
  misc_RNA (1)...(19): siRNA sense strand
acagaggacuccaucagaa

SEQ ID NO: 2674922 - RNA, 19 nt, Homo sapiens
  misc_RNA (1)...(19): siRNA sense strand
caauggucuuggaugauuu

SEQ ID NO: 2674923 - RNA, 19 nt, Homo sapiens
  misc_RNA (1)...(19): siRNA sense strand
caguuggacaaucgggaau

SEQ ID NO: 2674924 - RNA, 19 nt, Homo sapiens
  misc_RNA (1)...(19): siRNA sense strand
auaaugagccguuucuuua

SEQ ID NO: 2674925 - RNA, 19 nt, Homo sapiens
  misc_RNA (1)...(19): siRNA sense strand
cccaucaacuacuggaaga

SEQ ID NO: 2674926 - RNA, 19 nt, Homo sapiens
  misc_RNA (1)...(19): siRNA sense strand
cauaaugagccguuucuuu

SEQ ID NO: 2674927 - RNA, 19 nt, Homo sapiens
  misc_RNA (1)...(19): siRNA sense strand
aaaagguggaugagaagua

SEQ ID NO: 2674928 - RNA, 19 nt, Homo sapiens
  misc_RNA (1)...(19): siRNA sense strand
caucugaguuguccaugaa

SEQ ID NO: 2674929 - RNA, 19 nt, Homo sapiens
  misc_RNA (1)...(19): siRNA sense strand
cgguauuacuucuguggaa

SEQ ID NO: 2674930 - RNA, 19 nt, Homo sapiens
  misc_RNA (1)...(19): siRNA sense strand
gguuauuaauuguggacca

SEQ ID NO: 2674931 - RNA, 19 nt, Homo sapiens
  misc_RNA (1)...(19): siRNA sense strand
gcuccaaacuucugggcuu

SEQ ID NO: 2674932 - RNA, 19 nt, Homo sapiens
  misc_RNA (1)...(19): siRNA sense strand
uguacaaugcuuuggacaa

SEQ ID NO: 2674933 - RNA, 19 nt, Homo sapiens
  misc_RNA (1)...(19): siRNA sense strand
gugcaguaggcgucacaua

SEQ ID NO: 2674934 - RNA, 19 nt, Homo sapiens
  misc_RNA (1)...(19): siRNA sense strand
ugaaauuucuugaucccaa

SEQ ID NO: 2674935 - RNA, 19 nt, Homo sapiens
  misc_RNA (1)...(19): siRNA sense strand
gggucuauucgauggaaga

SEQ ID NO: 2674936 - RNA, 19 nt, Homo sapiens
  misc_RNA (1)...(19): siRNA sense strand
ccuccuggaaggugaagua

SEQ ID NO: 2674937 - RNA, 19 nt, Homo sapiens
  misc_RNA (1)...(19): siRNA sense strand
ccacagauuuugaaguaca

SEQ ID NO: 2674938 - RNA, 19 nt, Homo sapiens
  misc_RNA (1)...(19): siRNA sense strand
guguauaucugcugcgauc

SEQ ID NO: 2674939 - RNA, 19 nt, Homo sapiens
  misc_RNA (1)...(19): siRNA sense strand
cuauguagcaccagcuuau

SEQ ID NO: 2674940 - RNA, 19 nt, Homo sapiens
  misc_RNA (1)...(19): siRNA sense strand
cuguaaaugcauugaugga

SEQ ID NO: 2674941 - RNA, 19 nt, Homo sapiens
  misc_RNA (1)...(19): siRNA sense strand
cugcuauuggcaagacaaa

SEQ ID NO: 2674942 - RNA, 19 nt, Homo sapiens
  misc_RNA (1)...(19): siRNA sense strand
gggaaaagcaggagacgcu

SEQ ID NO: 2674943 - RNA, 19 nt, Homo sapiens
  misc_RNA (1)...(19): siRNA sense strand
aagaaaugcugaaugucca

SEQ ID NO: 2674944 - RNA, 19 nt, Homo sapiens
  misc_RNA (1)...(19): siRNA sense strand
ucagaguggacguuggauu

SEQ ID NO: 2674945 - RNA, 19 nt, Homo sapiens
  misc_RNA (1)...(19): siRNA sense strand
ugacaagugguuugguuca

SEQ ID NO: 2674946 - RNA, 19 nt, Homo sapiens
  misc_RNA (1)...(19): siRNA sense strand
cagaaaaggcauauggaag

SEQ ID NO: 2674947 - RNA, 19 nt, Homo sapiens
  misc_RNA (1)...(19): siRNA sense strand
ggguacuggcaauugguuu

SEQ ID NO: 2674948 - RNA, 19 nt, Homo sapiens
  misc_RNA (1)...(19): siRNA sense strand
aguucaagcaggagaucua

SEQ ID NO: 2674949 - RNA, 19 nt, Homo sapiens
  misc_RNA (1)...(19): siRNA sense strand
cuguggaaacugagaguca

SEQ ID NO: 2674950 - RNA, 19 nt, Homo sapiens
  misc_RNA (1)...(19): siRNA sense strand
cacaacaaguuuagggagu

SEQ ID NO: 2674951 - RNA, 19 nt, Homo sapiens
  misc_RNA (1)...(19): siRNA sense strand
ucgaagaagaagagccagu

SEQ ID NO: 2674952 - RNA, 19 nt, Homo sapiens
  misc_RNA (1)...(19): siRNA sense strand
caguggaguucaagcagga

SEQ ID NO: 2674953 - RNA, 19 nt, Homo sapiens
  misc_RNA (1)...(19): siRNA sense strand
ucucgaagaagaagagcca

SEQ ID NO: 2674954 - RNA, 19 nt, Homo sapiens
  misc_RNA (1)...(19): siRNA sense strand
aguccaucaucaaggcauu

SEQ ID NO: 2674955 - RNA, 19 nt, Homo sapiens
  misc_RNA (1)...(19): siRNA sense strand
ucucaagguaccagaaagu

SEQ ID NO: 2674956 - RNA, 19 nt, Homo sapiens
  misc_RNA (1)...(19): siRNA sense strand
gcuccuauuuccugggucu

SEQ ID NO: 2674957 - RNA, 19 nt, Homo sapiens
  misc_RNA (1)...(19): siRNA sense strand
aggaggagaaggaagaguu

SEQ ID NO: 2674958 - RNA, 19 nt, Homo sapiens
  misc_RNA (1)...(19): siRNA sense strand
uggaauuguuauuggcgau

SEQ ID NO: 2674959 - RNA, 19 nt, Homo sapiens
  misc_RNA (1)...(19): siRNA sense strand
cgaucggaguagucaugaa

SEQ ID NO: 2674960 - RNA, 19 nt, Homo sapiens
  misc_RNA (1)...(19): siRNA sense strand
auaaauacuugcuagcaga

SEQ ID NO: 2674961 - RNA, 19 nt, Homo sapiens
  misc_RNA (1)...(19): siRNA sense strand
ggccaaauagucaggacau

SEQ ID NO: 2674962 - RNA, 19 nt, Homo sapiens
  misc_RNA (1)...(19): siRNA sense strand
ggaaauucacuuaugcuca

SEQ ID NO: 2674963 - RNA, 19 nt, Homo sapiens
  misc_RNA (1)...(19): siRNA sense strand
uguaguaguuaauggugga

SEQ ID NO: 2674964 - RNA, 19 nt, Homo sapiens
  misc_RNA (1)...(19): siRNA sense strand
cuagcagacaauagacauu

SEQ ID NO: 2674965 - RNA, 19 nt, Homo sapiens
  misc_RNA (1)...(19): siRNA sense strand
gcaacgaacuggaguggga

SEQ ID NO: 2674966 - RNA, 19 nt, Homo sapiens
  misc_RNA (1)...(19): siRNA sense strand
gaggaaagacugaaggcca

SEQ ID NO: 2674967 - RNA, 19 nt, Homo sapiens
  misc_RNA (1)...(19): siRNA sense strand
cugaaggccaggagggaga

SEQ ID NO: 2674968 - RNA, 19 nt, Homo sapiens
  misc_RNA (1)...(19): siRNA sense strand
cugaagaagugcuaccaga

SEQ ID NO: 2674969 - RNA, 19 nt, Homo sapiens
  misc_RNA (1)...(19): siRNA sense strand
ccugcaauacgaagaggaa

SEQ ID NO: 2674970 - RNA, 19 nt, Homo sapiens
  misc_RNA (1)...(19): siRNA sense strand
auauuaacguggaugacau

SEQ ID NO: 2674971 - RNA, 19 nt, Homo sapiens
  misc_RNA (1)...(19): siRNA sense strand
ucucagaagaucaggaaac

SEQ ID NO: 2674972 - RNA, 19 nt, Homo sapiens
  misc_RNA (1)...(19): siRNA sense strand
gcgaaggccucaacgccau

SEQ ID NO: 2674973 - RNA, 19 nt, Homo sapiens
  misc_RNA (1)...(19): siRNA sense strand
acaugaaaguggucaccca

SEQ ID NO: 2674974 - RNA, 19 nt, Homo sapiens
  misc_RNA (1)...(19): siRNA sense strand
cugcaauacgaagaggaaa

SEQ ID NO: 2674975 - RNA, 19 nt, Homo sapiens
  misc_RNA (1)...(19): siRNA sense strand
aggaaagacugaaggccag

SEQ ID NO: 2674976 - RNA, 19 nt, Homo sapiens
  misc_RNA (1)...(19): siRNA sense strand
uggauauuaacguggauga

SEQ ID NO: 2674977 - RNA, 19 nt, Homo sapiens
  misc_RNA (1)...(19): siRNA sense strand
accacuacaucauggagaa

SEQ ID NO: 2674978 - RNA, 19 nt, Homo sapiens
  misc_RNA (1)...(19): siRNA sense strand
gcuuggaagaccuggagca

SEQ ID NO: 2674979 - RNA, 19 nt, Homo sapiens
  misc_RNA (1)...(19): siRNA sense strand
gcaaugagcacuuuggcau

SEQ ID NO: 2674980 - RNA, 19 nt, Homo sapiens
  misc_RNA (1)...(19): siRNA sense strand
ucucagaagcaauagaaaa

SEQ ID NO: 2674981 - RNA, 19 nt, Homo sapiens
  misc_RNA (1)...(19): siRNA sense strand
ucaacagauacgaaaggaa

SEQ ID NO: 2674982 - RNA, 19 nt, Homo sapiens
  misc_RNA (1)...(19): siRNA sense strand
uggaacauuaucaggaauu

SEQ ID NO: 2674983 - RNA, 19 nt, Homo sapiens
  misc_RNA (1)...(19): siRNA sense strand
caagauugggagaggguuc

SEQ ID NO: 2674984 - RNA, 19 nt, Homo sapiens
  misc_RNA (1)...(19): siRNA sense strand
gcaucuuagucaacagcca

SEQ ID NO: 2674985 - RNA, 19 nt, Homo sapiens
  misc_RNA (1)...(19): siRNA sense strand
gugguuaugacgagagagu

SEQ ID NO: 2674986 - RNA, 19 nt, Homo sapiens
  misc_RNA (1)...(19): siRNA sense strand
agagccagagugaaggaaa

SEQ ID NO: 2674987 - RNA, 19 nt, Homo sapiens
  misc_RNA (1)...(19): siRNA sense strand
guggaacauuaucaggaau

SEQ ID NO: 2674988 - RNA, 19 nt, Homo sapiens
  misc_RNA (1)...(19): siRNA sense strand
cggcggaagaagauccuau

SEQ ID NO: 2674989 - RNA, 19 nt, Homo sapiens
  misc_RNA (1)...(19): siRNA sense strand
cugaaaagcuggaugaccu

SEQ ID NO: 2674990 - RNA, 19 nt, Homo sapiens
  misc_RNA (1)...(19): siRNA sense strand
caacagauacgaaaggaag

SEQ ID NO: 2674991 - RNA, 19 nt, Homo sapiens
  misc_RNA (1)...(19): siRNA sense strand
agauacgaaaggaagaaaa

SEQ ID NO: 2674992 - RNA, 19 nt, Homo sapiens
  misc_RNA (1)...(19): siRNA sense strand
gcaaugagcacuuuggcau

SEQ ID NO: 2674993 - RNA, 19 nt, Homo sapiens
  misc_RNA (1)...(19): siRNA sense strand
ucucagaagcaauagaaaa

SEQ ID NO: 2674994 - RNA, 19 nt, Homo sapiens
  misc_RNA (1)...(19): siRNA sense strand
ucaacagauacgaaaggaa

SEQ ID NO: 2674995 - RNA, 19 nt, Homo sapiens
  misc_RNA (1)...(19): siRNA sense strand
uggaacauuaucaggaauu

SEQ ID NO: 2674996 - RNA, 19 nt, Homo sapiens
  misc_RNA (1)...(19): siRNA sense strand
caagauugggagaggguuc

SEQ ID NO: 2674997 - RNA, 19 nt, Homo sapiens
  misc_RNA (1)...(19): siRNA sense strand
gcaucuuagucaacagcca

SEQ ID NO: 2674998 - RNA, 19 nt, Homo sapiens
  misc_RNA (1)...(19): siRNA sense strand
gugguuaugacgagagagu

SEQ ID NO: 2674999 - RNA, 19 nt, Homo sapiens
  misc_RNA (1)...(19): siRNA sense strand
agagccagagugaaggaaa

SEQ ID NO: 2675000 - RNA, 19 nt, Homo sapiens
  misc_RNA (1)...(19): siRNA sense strand
guggaacauuaucaggaau

SEQ ID NO: 2675001 - RNA, 19 nt, Homo sapiens
  misc_RNA (1)...(19): siRNA sense strand
cggcggaagaagauccuau

SEQ ID NO: 2675002 - RNA, 19 nt, Homo sapiens
  misc_RNA (1)...(19): siRNA sense strand
cugaaaagcuggaugaccu

SEQ ID NO: 2675003 - RNA, 19 nt, Homo sapiens
  misc_RNA (1)...(19): siRNA sense strand
caacagauacgaaaggaag

SEQ ID NO: 2675004 - RNA, 19 nt, Homo sapiens
  misc_RNA (1)...(19): siRNA sense strand
agauacgaaaggaagaaaa

SEQ ID NO: 2675005 - RNA, 19 nt, Homo sapiens
  misc_RNA (1)...(19): siRNA sense strand
aagaaagaggauaaagaga

SEQ ID NO: 2675006 - RNA, 19 nt, Homo sapiens
  misc_RNA (1)...(19): siRNA sense strand
caguugaaggaaagaaaga

SEQ ID NO: 2675007 - RNA, 19 nt, Homo sapiens
  misc_RNA (1)...(19): siRNA sense strand
augaagaagcaguucgauu

SEQ ID NO: 2675008 - RNA, 19 nt, Homo sapiens
  misc_RNA (1)...(19): siRNA sense strand
aggaaagaaagaggauaaa

SEQ ID NO: 2675009 - RNA, 19 nt, Homo sapiens
  misc_RNA (1)...(19): siRNA sense strand
ugaaggaaagaaagaggau

SEQ ID NO: 2675010 - RNA, 19 nt, Homo sapiens
  misc_RNA (1)...(19): siRNA sense strand
ggccaagagcauaguuuua

SEQ ID NO: 2675011 - RNA, 19 nt, Homo sapiens
  misc_RNA (1)...(19): siRNA sense strand
gacaaagaugggaacgcua

SEQ ID NO: 2675012 - RNA, 19 nt, Homo sapiens
  misc_RNA (1)...(19): siRNA sense strand
gaaagaggauaaagagagc

SEQ ID NO: 2675013 - RNA, 19 nt, Homo sapiens
  misc_RNA (1)...(19): siRNA sense strand
accaguugaaggaaagaaa

SEQ ID NO: 2675014 - RNA, 19 nt, Homo sapiens
  misc_RNA (1)...(19): siRNA sense strand
gauaaagagagcagguggu

SEQ ID NO: 2675015 - RNA, 19 nt, Homo sapiens
  misc_RNA (1)...(19): siRNA sense strand
acaccaaaguggaggagag

SEQ ID NO: 2675016 - RNA, 19 nt, Homo sapiens
  misc_RNA (1)...(19): siRNA sense strand
ggagguacgacaagaggga

SEQ ID NO: 2675017 - RNA, 19 nt, Homo sapiens
  misc_RNA (1)...(19): siRNA sense strand
acguccaccugcagacaaa

SEQ ID NO: 2675018 - RNA, 19 nt, Homo sapiens
  misc_RNA (1)...(19): siRNA sense strand
acgacaagagggaggaugu

SEQ ID NO: 2675019 - RNA, 19 nt, Homo sapiens
  misc_RNA (1)...(19): siRNA sense strand
ggaaaggggucaucaggca

SEQ ID NO: 2675020 - RNA, 19 nt, Homo sapiens
  misc_RNA (1)...(19): siRNA sense strand
aggaagaggaggaggagga

SEQ ID NO: 2675021 - RNA, 19 nt, Homo sapiens
  misc_RNA (1)...(19): siRNA sense strand
aggaggaggaggaggaaga

SEQ ID NO: 2675022 - RNA, 19 nt, Homo sapiens
  misc_RNA (1)...(19): siRNA sense strand
cagaacaaccagcuggaaa

SEQ ID NO: 2675023 - RNA, 19 nt, Homo sapiens
  misc_RNA (1)...(19): siRNA sense strand
aggaaaaggaggaggagga

SEQ ID NO: 2675024 - RNA, 19 nt, Homo sapiens
  misc_RNA (1)...(19): siRNA sense strand
agaacaaccagcuggaaaa

SEQ ID NO: 2675025 - RNA, 19 nt, Homo sapiens
  misc_RNA (1)...(19): siRNA sense strand
agaacaacaagcuggagaa

SEQ ID NO: 2675026 - RNA, 19 nt, Homo sapiens
  misc_RNA (1)...(19): siRNA sense strand
ugcugaaggucaagcgcaa

SEQ ID NO: 2675027 - RNA, 19 nt, Homo sapiens
  misc_RNA (1)...(19): siRNA sense strand
cguuugagcaucugaccaa

SEQ ID NO: 2675028 - RNA, 19 nt, Homo sapiens
  misc_RNA (1)...(19): siRNA sense strand
agagaaggcguuugagcau

SEQ ID NO: 2675029 - RNA, 19 nt, Homo sapiens
  misc_RNA (1)...(19): siRNA sense strand
aggaggaggaagaggagga

SEQ ID NO: 2675030 - RNA, 19 nt, Homo sapiens
  misc_RNA (1)...(19): siRNA sense strand
aggaggaagaggaggagga

SEQ ID NO: 2675031 - RNA, 19 nt, Homo sapiens
  misc_RNA (1)...(19): siRNA sense strand
ucuuggacauugaaggcaa

SEQ ID NO: 2675032 - RNA, 19 nt, Homo sapiens
  misc_RNA (1)...(19): siRNA sense strand
cugacgagggccuggacaa

SEQ ID NO: 2675033 - RNA, 19 nt, Homo sapiens
  misc_RNA (1)...(19): siRNA sense strand
aaaaggaggaggaggaaga

SEQ ID NO: 2675034 - RNA, 19 nt, Homo sapiens
  misc_RNA (1)...(19): siRNA sense strand
aggaggaggaagaggaaac

SEQ ID NO: 2675035 - RNA, 19 nt, Homo sapiens
  misc_RNA (1)...(19): siRNA sense strand
agaacgaauuugcggagga

SEQ ID NO: 2675036 - RNA, 19 nt, Homo sapiens
  misc_RNA (1)...(19): siRNA sense strand
aagaggaggaggaggagga

SEQ ID NO: 2675037 - RNA, 19 nt, Homo sapiens
  misc_RNA (1)...(19): siRNA sense strand
acgaauuugcggaggagga

SEQ ID NO: 2675038 - RNA, 19 nt, Homo sapiens
  misc_RNA (1)...(19): siRNA sense strand
caaccagaucacaggcauu

SEQ ID NO: 2675039 - RNA, 19 nt, Homo sapiens
  misc_RNA (1)...(19): siRNA sense strand
gcaaugagcuggcugccuu

SEQ ID NO: 2675040 - RNA, 19 nt, Homo sapiens
  misc_RNA (1)...(19): siRNA sense strand
accuguaccugcagaacaa

SEQ ID NO: 2675041 - RNA, 19 nt, Homo sapiens
  misc_RNA (1)...(19): siRNA sense strand
ggaaggaaaaggaggagga

SEQ ID NO: 2675042 - RNA, 19 nt, Homo sapiens
  misc_RNA (1)...(19): siRNA sense strand
ggacuuugcugccaacuau

SEQ ID NO: 2675043 - RNA, 19 nt, Homo sapiens
  misc_RNA (1)...(19): siRNA sense strand
caacaagauuagugcggug

SEQ ID NO: 2675044 - RNA, 19 nt, Homo sapiens
  misc_RNA (1)...(19): siRNA sense strand
ccaauaacaagcugaccuu

SEQ ID NO: 2675045 - RNA, 19 nt, Homo sapiens
  misc_RNA (1)...(19): siRNA sense strand
cagagaaggcguuugagca

SEQ ID NO: 2675046 - RNA, 19 nt, Homo sapiens
  misc_RNA (1)...(19): siRNA sense strand
aggaggaggaggaagagga

SEQ ID NO: 2675047 - RNA, 19 nt, Homo sapiens
  misc_RNA (1)...(19): siRNA sense strand
aggaggaggaggaagagga

SEQ ID NO: 2675048 - RNA, 19 nt, Homo sapiens
  misc_RNA (1)...(19): siRNA sense strand
ggccagaagccaaacuuga

SEQ ID NO: 2675049 - RNA, 19 nt, Homo sapiens
  misc_RNA (1)...(19): siRNA sense strand
agaacaacuaccugacuga

SEQ ID NO: 2675050 - RNA, 19 nt, Homo sapiens
  misc_RNA (1)...(19): siRNA sense strand
ggacaaaaguugagggugu

SEQ ID NO: 2675051 - RNA, 19 nt, Homo sapiens
  misc_RNA (1)...(19): siRNA sense strand
ggauaaacgacaugaagau

SEQ ID NO: 2675052 - RNA, 19 nt, Homo sapiens
  misc_RNA (1)...(19): siRNA sense strand
acauaaugggagugugaaa

SEQ ID NO: 2675053 - RNA, 19 nt, Homo sapiens
  misc_RNA (1)...(19): siRNA sense strand
cauuagaagcuuuggaaga

SEQ ID NO: 2675054 - RNA, 19 nt, Homo sapiens
  misc_RNA (1)...(19): siRNA sense strand
aggaagaagaugaagaaga

SEQ ID NO: 2675055 - RNA, 19 nt, Homo sapiens
  misc_RNA (1)...(19): siRNA sense strand
ggggcuaguuugugaaaua

SEQ ID NO: 2675056 - RNA, 19 nt, Homo sapiens
  misc_RNA (1)...(19): siRNA sense strand
guaacaaccaacaggcaaa

SEQ ID NO: 2675057 - RNA, 19 nt, Homo sapiens
  misc_RNA (1)...(19): siRNA sense strand
ugaaagagauuuaagggau

SEQ ID NO: 2675058 - RNA, 19 nt, Homo sapiens
  misc_RNA (1)...(19): siRNA sense strand
ggacguacucauagaucaa

SEQ ID NO: 2675059 - RNA, 19 nt, Homo sapiens
  misc_RNA (1)...(19): siRNA sense strand
ggaugaacuuaucgaugaa

SEQ ID NO: 2675060 - RNA, 19 nt, Homo sapiens
  misc_RNA (1)...(19): siRNA sense strand
ugauauugaugguggagau

SEQ ID NO: 2675061 - RNA, 19 nt, Homo sapiens
  misc_RNA (1)...(19): siRNA sense strand
uaauaaagaaggagcuaga

SEQ ID NO: 2675062 - RNA, 19 nt, Homo sapiens
  misc_RNA (1)...(19): siRNA sense strand
agaaaagaccacaagaaaa

SEQ ID NO: 2675063 - RNA, 19 nt, Homo sapiens
  misc_RNA (1)...(19): siRNA sense strand
aaacauaaugggaguguga

SEQ ID NO: 2675064 - RNA, 19 nt, Homo sapiens
  misc_RNA (1)...(19): siRNA sense strand
ugaacuggcaggagaacaa

SEQ ID NO: 2675065 - RNA, 19 nt, Homo sapiens
  misc_RNA (1)...(19): siRNA sense strand
caaugguacaguaaagaaa

SEQ ID NO: 2675066 - RNA, 19 nt, Homo sapiens
  misc_RNA (1)...(19): siRNA sense strand
aggaaaucaagaauggaaa

SEQ ID NO: 2675067 - RNA, 19 nt, Homo sapiens
  misc_RNA (1)...(19): siRNA sense strand
agauaguccuuguaaagaa

SEQ ID NO: 2675068 - RNA, 19 nt, Homo sapiens
  misc_RNA (1)...(19): siRNA sense strand
augaugaaccagaggaaga

SEQ ID NO: 2675069 - RNA, 19 nt, Homo sapiens
  misc_RNA (1)...(19): siRNA sense strand
gaggaaaucaagaauggaa

SEQ ID NO: 2675070 - RNA, 19 nt, Homo sapiens
  misc_RNA (1)...(19): siRNA sense strand
agggacggguugugagcaa

SEQ ID NO: 2675071 - RNA, 19 nt, Homo sapiens
  misc_RNA (1)...(19): siRNA sense strand
cgauagaagggcaacagaa

SEQ ID NO: 2675072 - RNA, 19 nt, Homo sapiens
  misc_RNA (1)...(19): siRNA sense strand
augaagaagaaauggguca

SEQ ID NO: 2675073 - RNA, 19 nt, Homo sapiens
  misc_RNA (1)...(19): siRNA sense strand
aaucaaaggcgaagaguuc

SEQ ID NO: 2675074 - RNA, 19 nt, Homo sapiens
  misc_RNA (1)...(19): siRNA sense strand
gguacuccauuuagagaau

SEQ ID NO: 2675075 - RNA, 19 nt, Homo sapiens
  misc_RNA (1)...(19): siRNA sense strand
cgacaguggaagugaaucu

SEQ ID NO: 2675076 - RNA, 19 nt, Homo sapiens
  misc_RNA (1)...(19): siRNA sense strand
caagcagauaggagagcua

SEQ ID NO: 2675077 - RNA, 19 nt, Homo sapiens
  misc_RNA (1)...(19): siRNA sense strand
ugaggaaaccauugauaau

SEQ ID NO: 2675078 - RNA, 19 nt, Homo sapiens
  misc_RNA (1)...(19): siRNA sense strand
ggaaaucaagaauggaaaa

SEQ ID NO: 2675079 - RNA, 19 nt, Homo sapiens
  misc_RNA (1)...(19): siRNA sense strand
ccuuauaacaagucaggau

SEQ ID NO: 2675080 - RNA, 19 nt, Homo sapiens
  misc_RNA (1)...(19): siRNA sense strand
ggaagaugggcaacggauu

SEQ ID NO: 2675081 - RNA, 19 nt, Homo sapiens
  misc_RNA (1)...(19): siRNA sense strand
gaguggaauuaguccgaau

SEQ ID NO: 2675082 - RNA, 19 nt, Homo sapiens
  misc_RNA (1)...(19): siRNA sense strand
gggcucagcagaugaagaa

SEQ ID NO: 2675083 - RNA, 19 nt, Homo sapiens
  misc_RNA (1)...(19): siRNA sense strand
guuucugacuccaggauau

SEQ ID NO: 2675084 - RNA, 19 nt, Homo sapiens
  misc_RNA (1)...(19): siRNA sense strand
cagaggaagaagaugaaga

SEQ ID NO: 2675085 - RNA, 19 nt, Homo sapiens
  misc_RNA (1)...(19): siRNA sense strand
uuuuagagcuucagaacaa

SEQ ID NO: 2675086 - RNA, 19 nt, Homo sapiens
  misc_RNA (1)...(19): siRNA sense strand
guauggaagaaaugcuuua

SEQ ID NO: 2675087 - RNA, 19 nt, Homo sapiens
  misc_RNA (1)...(19): siRNA sense strand
agaugaugaaccagaggaa

SEQ ID NO: 2675088 - RNA, 19 nt, Homo sapiens
  misc_RNA (1)...(19): siRNA sense strand
gcuuugagugagaguggaa

SEQ ID NO: 2675089 - RNA, 19 nt, Homo sapiens
  misc_RNA (1)...(19): siRNA sense strand
aggcaaaccaucacuuuaa

SEQ ID NO: 2675090 - RNA, 19 nt, Homo sapiens
  misc_RNA (1)...(19): siRNA sense strand
aagagauaguccuuguaaa

SEQ ID NO: 2675091 - RNA, 19 nt, Homo sapiens
  misc_RNA (1)...(19): siRNA sense strand
gggaaugucaugggaggaa

SEQ ID NO: 2675092 - RNA, 19 nt, Homo sapiens
  misc_RNA (1)...(19): siRNA sense strand
gcaacauggccuauaugaa

SEQ ID NO: 2675093 - RNA, 19 nt, Homo sapiens
  misc_RNA (1)...(19): siRNA sense strand
gcauagcauccaaaguuaa

SEQ ID NO: 2675094 - RNA, 19 nt, Homo sapiens
  misc_RNA (1)...(19): siRNA sense strand
agaaauaacucgagaagcc

SEQ ID NO: 2675095 - RNA, 19 nt, Homo sapiens
  misc_RNA (1)...(19): siRNA sense strand
aaguauagauccagauucu

SEQ ID NO: 2675096 - RNA, 19 nt, Homo sapiens
  misc_RNA (1)...(19): siRNA sense strand
cugaggaaaccauugauaa

SEQ ID NO: 2675097 - RNA, 19 nt, Homo sapiens
  misc_RNA (1)...(19): siRNA sense strand
cgauggagugauaguguuu

SEQ ID NO: 2675098 - RNA, 19 nt, Homo sapiens
  misc_RNA (1)...(19): siRNA sense strand
cugauaaugaagaaaguga

SEQ ID NO: 2675099 - RNA, 19 nt, Homo sapiens
  misc_RNA (1)...(19): siRNA sense strand
uagaaaagaccacaagaaa

SEQ ID NO: 2675100 - RNA, 19 nt, Homo sapiens
  misc_RNA (1)...(19): siRNA sense strand
gcuauggauaugaagcuua

SEQ ID NO: 2675101 - RNA, 19 nt, Homo sapiens
  misc_RNA (1)...(19): siRNA sense strand
acaguaacaccaacaguaa

SEQ ID NO: 2675102 - RNA, 19 nt, Homo sapiens
  misc_RNA (1)...(19): siRNA sense strand
cgauuuauggauggagaua

SEQ ID NO: 2675103 - RNA, 19 nt, Homo sapiens
  misc_RNA (1)...(19): siRNA sense strand
auaaagaaggagcuagaau

SEQ ID NO: 2675104 - RNA, 19 nt, Homo sapiens
  misc_RNA (1)...(19): siRNA sense strand
ugguggagaugcagggcuu

SEQ ID NO: 2675105 - RNA, 19 nt, Homo sapiens
  misc_RNA (1)...(19): siRNA sense strand
aguaugaugcugaaagaga

SEQ ID NO: 2675106 - RNA, 19 nt, Homo sapiens
  misc_RNA (1)...(19): siRNA sense strand
gagugauaguguuugauga

SEQ ID NO: 2675107 - RNA, 19 nt, Homo sapiens
  misc_RNA (1)...(19): siRNA sense strand
gugaagaaauaacucgaga

SEQ ID NO: 2675108 - RNA, 19 nt, Homo sapiens
  misc_RNA (1)...(19): siRNA sense strand
gcacuuacacauggcgaua

SEQ ID NO: 2675109 - RNA, 19 nt, Homo sapiens
  misc_RNA (1)...(19): siRNA sense strand
acagaaacagcuauggcaa

SEQ ID NO: 2675110 - RNA, 19 nt, Homo sapiens
  misc_RNA (1)...(19): siRNA sense strand
gugcauuagaacuagguuu

SEQ ID NO: 2675111 - RNA, 19 nt, Homo sapiens
  misc_RNA (1)...(19): siRNA sense strand
uggcaauguggaagagauu

SEQ ID NO: 2675112 - RNA, 19 nt, Homo sapiens
  misc_RNA (1)...(19): siRNA sense strand
gcugcaagauuauuggcaa

SEQ ID NO: 2675113 - RNA, 19 nt, Homo sapiens
  misc_RNA (1)...(19): siRNA sense strand
ggacaagaaugaugaggag

SEQ ID NO: 2675114 - RNA, 19 nt, Homo sapiens
  misc_RNA (1)...(19): siRNA sense strand
cugccaugauccacaacaa

SEQ ID NO: 2675115 - RNA, 19 nt, Homo sapiens
  misc_RNA (1)...(19): siRNA sense strand
cuaacuaccucaacggcuu

SEQ ID NO: 2675116 - RNA, 19 nt, Homo sapiens
  misc_RNA (1)...(19): siRNA sense strand
ggaaagagauguggcugca

SEQ ID NO: 2675117 - RNA, 19 nt, Homo sapiens
  misc_RNA (1)...(19): siRNA sense strand
cugcaagauuauuggcaag

SEQ ID NO: 2675118 - RNA, 19 nt, Homo sapiens
  misc_RNA (1)...(19): siRNA sense strand
augaaacagagcagacgaa

SEQ ID NO: 2675119 - RNA, 19 nt, Homo sapiens
  misc_RNA (1)...(19): siRNA sense strand
gcuuuggcaauguggaaga

SEQ ID NO: 2675120 - RNA, 19 nt, Homo sapiens
  misc_RNA (1)...(19): siRNA sense strand
caacaaugaaacagagcag

SEQ ID NO: 2675121 - RNA, 19 nt, Homo sapiens
  misc_RNA (1)...(19): siRNA sense strand
cgggaaaugccugcagaau

SEQ ID NO: 2675122 - RNA, 19 nt, Homo sapiens
  misc_RNA (1)...(19): siRNA sense strand
agguagaaggcgucaucaa

SEQ ID NO: 2675123 - RNA, 19 nt, Homo sapiens
  misc_RNA (1)...(19): siRNA sense strand
gggaaucugugcuggccuu

SEQ ID NO: 2675124 - RNA, 19 nt, Homo sapiens
  misc_RNA (1)...(19): siRNA sense strand
gagauugacuggaaggccu

SEQ ID NO: 2675125 - RNA, 19 nt, Homo sapiens
  misc_RNA (1)...(19): siRNA sense strand
uggcagucucugugaagau

SEQ ID NO: 2675126 - RNA, 19 nt, Homo sapiens
  misc_RNA (1)...(19): siRNA sense strand
cacccaacacagcaagaaa

SEQ ID NO: 2675127 - RNA, 19 nt, Homo sapiens
  misc_RNA (1)...(19): siRNA sense strand
cgaugaugaaggagaacuu

SEQ ID NO: 2675128 - RNA, 19 nt, Homo sapiens
  misc_RNA (1)...(19): siRNA sense strand
cgccacugucuuugagaaa

SEQ ID NO: 2675129 - RNA, 19 nt, Homo sapiens
  misc_RNA (1)...(19): siRNA sense strand
aagaaugaggauaagaaga

SEQ ID NO: 2675130 - RNA, 19 nt, Homo sapiens
  misc_RNA (1)...(19): siRNA sense strand
ccauaauaggcaugaucga

SEQ ID NO: 2675131 - RNA, 19 nt, Homo sapiens
  misc_RNA (1)...(19): siRNA sense strand
cugacgaugaugaaggaga

SEQ ID NO: 2675132 - RNA, 19 nt, Homo sapiens
  misc_RNA (1)...(19): siRNA sense strand
ggcaagauugagaagccaa

SEQ ID NO: 2675133 - RNA, 19 nt, Homo sapiens
  misc_RNA (1)...(19): siRNA sense strand
aggaagaugaagaggauga

SEQ ID NO: 2675134 - RNA, 19 nt, Homo sapiens
  misc_RNA (1)...(19): siRNA sense strand
aggaugaagaagagcggaa

SEQ ID NO: 2675135 - RNA, 19 nt, Homo sapiens
  misc_RNA (1)...(19): siRNA sense strand
gcacaaucugcaugggaca

SEQ ID NO: 2675136 - RNA, 19 nt, Homo sapiens
  misc_RNA (1)...(19): siRNA sense strand
augaagaagaagaggagga

SEQ ID NO: 2675137 - RNA, 19 nt, Homo sapiens
  misc_RNA (1)...(19): siRNA sense strand
cugagagcgcccagagcaa

SEQ ID NO: 2675138 - RNA, 19 nt, Homo sapiens
  misc_RNA (1)...(19): siRNA sense strand
aagaggaggaagaugaaga

SEQ ID NO: 2675139 - RNA, 19 nt, Homo sapiens
  misc_RNA (1)...(19): siRNA sense strand
ucauggacgaggaggccua

SEQ ID NO: 2675140 - RNA, 19 nt, Homo sapiens
  misc_RNA (1)...(19): siRNA sense strand
gugaugaagaagaagagga

SEQ ID NO: 2675141 - RNA, 19 nt, Homo sapiens
  misc_RNA (1)...(19): siRNA sense strand
cagagaagggccaggugga

SEQ ID NO: 2675142 - RNA, 19 nt, Homo sapiens
  misc_RNA (1)...(19): siRNA sense strand
aggaggaagaugaagagga

SEQ ID NO: 2675143 - RNA, 19 nt, Homo sapiens
  misc_RNA (1)...(19): siRNA sense strand
cggaagaaccugcgggagu

SEQ ID NO: 2675144 - RNA, 19 nt, Homo sapiens
  misc_RNA (1)...(19): siRNA sense strand
uggugaaacaugaagaaaa

SEQ ID NO: 2675145 - RNA, 19 nt, Homo sapiens
  misc_RNA (1)...(19): siRNA sense strand
cagaggaacuggcagcuca

SEQ ID NO: 2675146 - RNA, 19 nt, Homo sapiens
  misc_RNA (1)...(19): siRNA sense strand
uggccaagugguacgagaa

SEQ ID NO: 2675147 - RNA, 19 nt, Homo sapiens
  misc_RNA (1)...(19): siRNA sense strand
cgagcuggacagaggacga

SEQ ID NO: 2675148 - RNA, 19 nt, Homo sapiens
  misc_RNA (1)...(19): siRNA sense strand
ggaaguugauguggaggga

SEQ ID NO: 2675149 - RNA, 19 nt, Homo sapiens
  misc_RNA (1)...(19): siRNA sense strand
uugcaauaguuaagaguca

SEQ ID NO: 2675150 - RNA, 19 nt, Homo sapiens
  misc_RNA (1)...(19): siRNA sense strand
gcagcaaacaggaagcaca

SEQ ID NO: 2675151 - RNA, 19 nt, Homo sapiens
  misc_RNA (1)...(19): siRNA sense strand
uugaagaauucuacggguu

SEQ ID NO: 2675152 - RNA, 19 nt, Homo sapiens
  misc_RNA (1)...(19): siRNA sense strand
cggcauuagagaaagagau

SEQ ID NO: 2675153 - RNA, 19 nt, Homo sapiens
  misc_RNA (1)...(19): siRNA sense strand
guuuaacacuucaggugau

SEQ ID NO: 2675154 - RNA, 19 nt, Homo sapiens
  misc_RNA (1)...(19): siRNA sense strand
gggaauaccugcuacugca

SEQ ID NO: 2675155 - RNA, 19 nt, Homo sapiens
  misc_RNA (1)...(19): siRNA sense strand
cuucggcauuagagaaaga

SEQ ID NO: 2675156 - RNA, 19 nt, Homo sapiens
  misc_RNA (1)...(19): siRNA sense strand
caagauuacggaaagaaaa

SEQ ID NO: 2675157 - RNA, 19 nt, Homo sapiens
  misc_RNA (1)...(19): siRNA sense strand
aagagagaaagcaggaaaa

SEQ ID NO: 2675158 - RNA, 19 nt, Homo sapiens
  misc_RNA (1)...(19): siRNA sense strand
agagaaagagauuggucca

SEQ ID NO: 2675159 - RNA, 19 nt, Homo sapiens
  misc_RNA (1)...(19): siRNA sense strand
caaacggaugaaaguuaaa

SEQ ID NO: 2675160 - RNA, 19 nt, Homo sapiens
  misc_RNA (1)...(19): siRNA sense strand
gguuguuguuugaugacga

SEQ ID NO: 2675161 - RNA, 19 nt, Homo sapiens
  misc_RNA (1)...(19): siRNA sense strand
gcuuaagggguuucagcaa

SEQ ID NO: 2675162 - RNA, 19 nt, Homo sapiens
  misc_RNA (1)...(19): siRNA sense strand
caaucgaggccauuauauu

SEQ ID NO: 2675163 - RNA, 19 nt, Homo sapiens
  misc_RNA (1)...(19): siRNA sense strand
aagaagagagaaagcagga

SEQ ID NO: 2675164 - RNA, 19 nt, Homo sapiens
  misc_RNA (1)...(19): siRNA sense strand
cuguggaaguggucccaau

SEQ ID NO: 2675165 - RNA, 19 nt, Homo sapiens
  misc_RNA (1)...(19): siRNA sense strand
gcaagaagcuggagggaga

SEQ ID NO: 2675166 - RNA, 19 nt, Homo sapiens
  misc_RNA (1)...(19): siRNA sense strand
ggaaagacguggagggcau

SEQ ID NO: 2675167 - RNA, 19 nt, Homo sapiens
  misc_RNA (1)...(19): siRNA sense strand
aggaagagcuggaggagga

SEQ ID NO: 2675168 - RNA, 19 nt, Homo sapiens
  misc_RNA (1)...(19): siRNA sense strand
ggagcugggaagacggaaa

SEQ ID NO: 2675169 - RNA, 19 nt, Homo sapiens
  misc_RNA (1)...(19): siRNA sense strand
uggaggaggagcagagcaa

SEQ ID NO: 2675170 - RNA, 19 nt, Homo sapiens
  misc_RNA (1)...(19): siRNA sense strand
augcagagguggagcggga

SEQ ID NO: 2675171 - RNA, 19 nt, Homo sapiens
  misc_RNA (1)...(19): siRNA sense strand
ugaagaaauuugaagagga

SEQ ID NO: 2675172 - RNA, 19 nt, Homo sapiens
  misc_RNA (1)...(19): siRNA sense strand
gcaaggaugacgucggcaa

SEQ ID NO: 2675173 - RNA, 19 nt, Homo sapiens
  misc_RNA (1)...(19): siRNA sense strand
aggaggaggagaaggucaa

SEQ ID NO: 2675174 - RNA, 19 nt, Homo sapiens
  misc_RNA (1)...(19): siRNA sense strand
uggagaagaagcagcgcaa

SEQ ID NO: 2675175 - RNA, 19 nt, Homo sapiens
  misc_RNA (1)...(19): siRNA sense strand
augccaagacagugaagaa

SEQ ID NO: 2675176 - RNA, 19 nt, Homo sapiens
  misc_RNA (1)...(19): siRNA sense strand
ggacagugggacagcucua

SEQ ID NO: 2675177 - RNA, 19 nt, Homo sapiens
  misc_RNA (1)...(19): siRNA sense strand
aagcugagcaagagcggaa

SEQ ID NO: 2675178 - RNA, 19 nt, Homo sapiens
  misc_RNA (1)...(19): siRNA sense strand
gauucagccacgaggaaau

SEQ ID NO: 2675179 - RNA, 19 nt, Homo sapiens
  misc_RNA (1)...(19): siRNA sense strand
agaaagugcaggagcuaca

SEQ ID NO: 2675180 - RNA, 19 nt, Homo sapiens
  misc_RNA (1)...(19): siRNA sense strand
cgucaaaugcaaaccgaga

SEQ ID NO: 2675181 - RNA, 19 nt, Homo sapiens
  misc_RNA (1)...(19): siRNA sense strand
gggcaguggaggaacguga

SEQ ID NO: 2675182 - RNA, 19 nt, Homo sapiens
  misc_RNA (1)...(19): siRNA sense strand
agacuaaggaacaggcuga

SEQ ID NO: 2675183 - RNA, 19 nt, Homo sapiens
  misc_RNA (1)...(19): siRNA sense strand
aggagaaggucaagagccu

SEQ ID NO: 2675184 - RNA, 19 nt, Homo sapiens
  misc_RNA (1)...(19): siRNA sense strand
uggccaagcagcugagaga

SEQ ID NO: 2675185 - RNA, 19 nt, Homo sapiens
  misc_RNA (1)...(19): siRNA sense strand
ccuagaggccuuuggcaau

SEQ ID NO: 2675186 - RNA, 19 nt, Homo sapiens
  misc_RNA (1)...(19): siRNA sense strand
ugcagaaagcccagacuaa

SEQ ID NO: 2675187 - RNA, 19 nt, Homo sapiens
  misc_RNA (1)...(19): siRNA sense strand
gggcaaaggugcaugggag

SEQ ID NO: 2675188 - RNA, 19 nt, Homo sapiens
  misc_RNA (1)...(19): siRNA sense strand
ugaacgaggcugaguccaa

SEQ ID NO: 2675189 - RNA, 19 nt, Homo sapiens
  misc_RNA (1)...(19): siRNA sense strand
gcacagaagcccagcugca

SEQ ID NO: 2675190 - RNA, 19 nt, Homo sapiens
  misc_RNA (1)...(19): siRNA sense strand
ucagcaaggccgaggacau

SEQ ID NO: 2675191 - RNA, 19 nt, Homo sapiens
  misc_RNA (1)...(19): siRNA sense strand
gugagcagcuggaggagga

SEQ ID NO: 2675192 - RNA, 19 nt, Homo sapiens
  misc_RNA (1)...(19): siRNA sense strand
uuaaagagguggugcucca

SEQ ID NO: 2675193 - RNA, 19 nt, Homo sapiens
  misc_RNA (1)...(19): siRNA sense strand
augcaaaccgagaagaaga

SEQ ID NO: 2675194 - RNA, 19 nt, Homo sapiens
  misc_RNA (1)...(19): siRNA sense strand
gaagaaauuugaagaggac

SEQ ID NO: 2675195 - RNA, 19 nt, Homo sapiens
  misc_RNA (1)...(19): siRNA sense strand
gggaacaggaggugacgga

SEQ ID NO: 2675196 - RNA, 19 nt, Homo sapiens
  misc_RNA (1)...(19): siRNA sense strand
ggcaaaggugcaugggaga

SEQ ID NO: 2675197 - RNA, 19 nt, Homo sapiens
  misc_RNA (1)...(19): siRNA sense strand
aaaugcaaaccgagaagaa

SEQ ID NO: 2675198 - RNA, 19 nt, Homo sapiens
  misc_RNA (1)...(19): siRNA sense strand
ggaggagaccagggcgaaa

SEQ ID NO: 2675199 - RNA, 19 nt, Homo sapiens
  misc_RNA (1)...(19): siRNA sense strand
agacagugaagaaugacaa

SEQ ID NO: 2675200 - RNA, 19 nt, Homo sapiens
  misc_RNA (1)...(19): siRNA sense strand
ggaaggaggaggagcugca

SEQ ID NO: 2675201 - RNA, 19 nt, Homo sapiens
  misc_RNA (1)...(19): siRNA sense strand
aggugacgacagaggcaaa

SEQ ID NO: 2675202 - RNA, 19 nt, Homo sapiens
  misc_RNA (1)...(19): siRNA sense strand
aagccauuguggagaugua

SEQ ID NO: 2675203 - RNA, 19 nt, Homo sapiens
  misc_RNA (1)...(19): siRNA sense strand
ccauggaccuggagcagca

SEQ ID NO: 2675204 - RNA, 19 nt, Homo sapiens
  misc_RNA (1)...(19): siRNA sense strand
uggcacagcuggaagagga

SEQ ID NO: 2675205 - RNA, 19 nt, Homo sapiens
  misc_RNA (1)...(19): siRNA sense strand
aggaggaggcggugaagca

SEQ ID NO: 2675206 - RNA, 19 nt, Homo sapiens
  misc_RNA (1)...(19): siRNA sense strand
ccuugaagagagaacggaa

SEQ ID NO: 2675207 - RNA, 19 nt, Homo sapiens
  misc_RNA (1)...(19): siRNA sense strand
gggaccagauccagcgcau

SEQ ID NO: 2675208 - RNA, 19 nt, Homo sapiens
  misc_RNA (1)...(19): siRNA sense strand
ugaagaagacucuggagga

SEQ ID NO: 2675209 - RNA, 19 nt, Homo sapiens
  misc_RNA (1)...(19): siRNA sense strand
ccaacgaguggcugaugaa

SEQ ID NO: 2675210 - RNA, 19 nt, Homo sapiens
  misc_RNA (1)...(19): siRNA sense strand
gggauucagccacgaggaa

SEQ ID NO: 2675211 - RNA, 19 nt, Homo sapiens
  misc_RNA (1)...(19): siRNA sense strand
agaagaggcuacagcagca

SEQ ID NO: 2675212 - RNA, 19 nt, Homo sapiens
  misc_RNA (1)...(19): siRNA sense strand
gaccagaauuccaagcuga

SEQ ID NO: 2675213 - RNA, 19 nt, Homo sapiens
  misc_RNA (1)...(19): siRNA sense strand
aggucaagagccucaauaa

SEQ ID NO: 2675214 - RNA, 19 nt, Homo sapiens
  misc_RNA (1)...(19): siRNA sense strand
cuggaaagcuggugcgcag

SEQ ID NO: 2675215 - RNA, 19 nt, Homo sapiens
  misc_RNA (1)...(19): siRNA sense strand
aggaggaguaccagcguga

SEQ ID NO: 2675216 - RNA, 19 nt, Homo sapiens
  misc_RNA (1)...(19): siRNA sense strand
aggaguuccggcagcgaua

SEQ ID NO: 2675217 - RNA, 19 nt, Homo sapiens
  misc_RNA (1)...(19): siRNA sense strand
gaggaggaggagaagguca

SEQ ID NO: 2675218 - RNA, 19 nt, Homo sapiens
  misc_RNA (1)...(19): siRNA sense strand
gagaaggucaagagccuca

SEQ ID NO: 2675219 - RNA, 19 nt, Homo sapiens
  misc_RNA (1)...(19): siRNA sense strand
gugacggagcugaagaaga

SEQ ID NO: 2675220 - RNA, 19 nt, Homo sapiens
  misc_RNA (1)...(19): siRNA sense strand
cauccgacgaggaggcaga

SEQ ID NO: 2675221 - RNA, 19 nt, Homo sapiens
  misc_RNA (1)...(19): siRNA sense strand
gcaucaaaguuggccgaga

SEQ ID NO: 2675222 - RNA, 19 nt, Homo sapiens
  misc_RNA (1)...(19): siRNA sense strand
gcugagagaugcagaggug

SEQ ID NO: 2675223 - RNA, 19 nt, Homo sapiens
  misc_RNA (1)...(19): siRNA sense strand
gaggaggagcagagcaacu

SEQ ID NO: 2675224 - RNA, 19 nt, Homo sapiens
  misc_RNA (1)...(19): siRNA sense strand
agaugcaggcccagaugaa

SEQ ID NO: 2675225 - RNA, 19 nt, Homo sapiens
  misc_RNA (1)...(19): siRNA sense strand
agaagacucuggaggagga

SEQ ID NO: 2675226 - RNA, 19 nt, Homo sapiens
  misc_RNA (1)...(19): siRNA sense strand
uagcagaacaggcagccaa

SEQ ID NO: 2675227 - RNA, 19 nt, Homo sapiens
  misc_RNA (1)...(19): siRNA sense strand
ggacagcucuacaaggagu

SEQ ID NO: 2675228 - RNA, 19 nt, Homo sapiens
  misc_RNA (1)...(19): siRNA sense strand
ugagagaugcagaggugga

SEQ ID NO: 2675229 - RNA, 19 nt, Homo sapiens
  misc_RNA (1)...(19): siRNA sense strand
augagguggccaaugguaa

SEQ ID NO: 2675230 - RNA, 19 nt, Homo sapiens
  misc_RNA (1)...(19): siRNA sense strand
cgguguagccacagaaaua

SEQ ID NO: 2675231 - RNA, 19 nt, Homo sapiens
  misc_RNA (1)...(19): siRNA sense strand
gcacaaagacugaagauca

SEQ ID NO: 2675232 - RNA, 19 nt, Homo sapiens
  misc_RNA (1)...(19): siRNA sense strand
gaaagaagcuggacugaau

SEQ ID NO: 2675233 - RNA, 19 nt, Homo sapiens
  misc_RNA (1)...(19): siRNA sense strand
agaguaaaguagugcuaaa

SEQ ID NO: 2675234 - RNA, 19 nt, Homo sapiens
  misc_RNA (1)...(19): siRNA sense strand
ugguagaagugaaagcuua

SEQ ID NO: 2675235 - RNA, 19 nt, Homo sapiens
  misc_RNA (1)...(19): siRNA sense strand
agaucaaggaagagaguga

SEQ ID NO: 2675236 - RNA, 19 nt, Homo sapiens
  misc_RNA (1)...(19): siRNA sense strand
cacaaagacugaagaucaa

SEQ ID NO: 2675237 - RNA, 19 nt, Homo sapiens
  misc_RNA (1)...(19): siRNA sense strand
gugggaugcugaagguaaa

SEQ ID NO: 2675238 - RNA, 19 nt, Homo sapiens
  misc_RNA (1)...(19): siRNA sense strand
agaaaggagaaaugaagaa

SEQ ID NO: 2675239 - RNA, 19 nt, Homo sapiens
  misc_RNA (1)...(19): siRNA sense strand
aggugauauugaagugaaa

SEQ ID NO: 2675240 - RNA, 19 nt, Homo sapiens
  misc_RNA (1)...(19): siRNA sense strand
aggaagagagugaggcauu

SEQ ID NO: 2675241 - RNA, 19 nt, Homo sapiens
  misc_RNA (1)...(19): siRNA sense strand
aaauaaaaguugaggagga

SEQ ID NO: 2675242 - RNA, 19 nt, Homo sapiens
  misc_RNA (1)...(19): siRNA sense strand
cagcgaauugagaaagaaa

SEQ ID NO: 2675243 - RNA, 19 nt, Homo sapiens
  misc_RNA (1)...(19): siRNA sense strand
gaagguaaacauuggagaa

SEQ ID NO: 2675244 - RNA, 19 nt, Homo sapiens
  misc_RNA (1)...(19): siRNA sense strand
ccaugugauuugcaagaua

SEQ ID NO: 2675245 - RNA, 19 nt, Homo sapiens
  misc_RNA (1)...(19): siRNA sense strand
aagcagagaaauugaaaca

SEQ ID NO: 2675246 - RNA, 19 nt, Homo sapiens
  misc_RNA (1)...(19): siRNA sense strand
gagaaauugaaacaggaaa

SEQ ID NO: 2675247 - RNA, 19 nt, Homo sapiens
  misc_RNA (1)...(19): siRNA sense strand
ggugggaugcugaagguaa

SEQ ID NO: 2675248 - RNA, 19 nt, Homo sapiens
  misc_RNA (1)...(19): siRNA sense strand
gacugaagaucaaggaaga

SEQ ID NO: 2675249 - RNA, 19 nt, Homo sapiens
  misc_RNA (1)...(19): siRNA sense strand
ugaagaacuugaagaacuu

SEQ ID NO: 2675250 - RNA, 19 nt, Homo sapiens
  misc_RNA (1)...(19): siRNA sense strand
aaggagaaaugaagaacuu

SEQ ID NO: 2675251 - RNA, 19 nt, Homo sapiens
  misc_RNA (1)...(19): siRNA sense strand
augaagaacuugaagaacu

SEQ ID NO: 2675252 - RNA, 19 nt, Homo sapiens
  misc_RNA (1)...(19): siRNA sense strand
caagaaaugaacacguuua

SEQ ID NO: 2675253 - RNA, 19 nt, Homo sapiens
  misc_RNA (1)...(19): siRNA sense strand
gaagaguaaaguagugcua

SEQ ID NO: 2675254 - RNA, 19 nt, Homo sapiens
  misc_RNA (1)...(19): siRNA sense strand
cugaggaagcaauggagaa

SEQ ID NO: 2675255 - RNA, 19 nt, Homo sapiens
  misc_RNA (1)...(19): siRNA sense strand
aagaagaauccaaggcaca

SEQ ID NO: 2675256 - RNA, 19 nt, Homo sapiens
  misc_RNA (1)...(19): siRNA sense strand
acuuaauucaggaggaaga

SEQ ID NO: 2675257 - RNA, 19 nt, Homo sapiens
  misc_RNA (1)...(19): siRNA sense strand
cuacaaaccaaaagaaaga

SEQ ID NO: 2675258 - RNA, 19 nt, Homo sapiens
  misc_RNA (1)...(19): siRNA sense strand
acuaagaccacuugaugua

SEQ ID NO: 2675259 - RNA, 19 nt, Homo sapiens
  misc_RNA (1)...(19): siRNA sense strand
aauacagcgaauugagaaa

SEQ ID NO: 2675260 - RNA, 19 nt, Homo sapiens
  misc_RNA (1)...(19): siRNA sense strand
acuugagguucaugagaau

SEQ ID NO: 2675261 - RNA, 19 nt, Homo sapiens
  misc_RNA (1)...(19): siRNA sense strand
ggauuuugcuucugaggaa

SEQ ID NO: 2675262 - RNA, 19 nt, Homo sapiens
  misc_RNA (1)...(19): siRNA sense strand
ggacaguggaaauauggaa

SEQ ID NO: 2675263 - RNA, 19 nt, Homo sapiens
  misc_RNA (1)...(19): siRNA sense strand
gcaucgacuugaagcaaaa

SEQ ID NO: 2675264 - RNA, 19 nt, Homo sapiens
  misc_RNA (1)...(19): siRNA sense strand
ggagaaaugaagaacuuga

SEQ ID NO: 2675265 - RNA, 19 nt, Homo sapiens
  misc_RNA (1)...(19): siRNA sense strand
gguagaagugaaagcuuau

SEQ ID NO: 2675266 - RNA, 19 nt, Homo sapiens
  misc_RNA (1)...(19): siRNA sense strand
ggcuugaaauacagcgaau

SEQ ID NO: 2675267 - RNA, 19 nt, Homo sapiens
  misc_RNA (1)...(19): siRNA sense strand
aggaagcaauggagaaagu

SEQ ID NO: 2675268 - RNA, 19 nt, Homo sapiens
  misc_RNA (1)...(19): siRNA sense strand
gcauuugguuggagcaagu

SEQ ID NO: 2675269 - RNA, 19 nt, Homo sapiens
  misc_RNA (1)...(19): siRNA sense strand
ugaggaagcaauggagaaa

SEQ ID NO: 2675270 - RNA, 19 nt, Homo sapiens
  misc_RNA (1)...(19): siRNA sense strand
aagugauugagaagaguaa

SEQ ID NO: 2675271 - RNA, 19 nt, Homo sapiens
  misc_RNA (1)...(19): siRNA sense strand
acaacaagaaagagggucu

SEQ ID NO: 2675272 - RNA, 19 nt, Homo sapiens
  misc_RNA (1)...(19): siRNA sense strand
gaaaugaagaacuugaaga

SEQ ID NO: 2675273 - RNA, 19 nt, Homo sapiens
  misc_RNA (1)...(19): siRNA sense strand
agaucuggacaguggaaau

SEQ ID NO: 2675274 - RNA, 19 nt, Homo sapiens
  misc_RNA (1)...(19): siRNA sense strand
auuugagauuccaaggaua

SEQ ID NO: 2675275 - RNA, 19 nt, Homo sapiens
  misc_RNA (1)...(19): siRNA sense strand
gugaaagcuuaucgacaga

SEQ ID NO: 2675276 - RNA, 19 nt, Homo sapiens
  misc_RNA (1)...(19): siRNA sense strand
guauuuaaggugagggaac

SEQ ID NO: 2675277 - RNA, 19 nt, Homo sapiens
  misc_RNA (1)...(19): siRNA sense strand
ccaagaaucaauacuacaa

SEQ ID NO: 2675278 - RNA, 19 nt, Homo sapiens
  misc_RNA (1)...(19): siRNA sense strand
aggaagaaucugaagccau

SEQ ID NO: 2675279 - RNA, 19 nt, Homo sapiens
  misc_RNA (1)...(19): siRNA sense strand
gguaaacauuggagaacug

SEQ ID NO: 2675280 - RNA, 19 nt, Homo sapiens
  misc_RNA (1)...(19): siRNA sense strand
ugaagcacuuaaagaagaa

SEQ ID NO: 2675281 - RNA, 19 nt, Homo sapiens
  misc_RNA (1)...(19): siRNA sense strand
caugugauuugcaagauaa

SEQ ID NO: 2675282 - RNA, 19 nt, Homo sapiens
  misc_RNA (1)...(19): siRNA sense strand
gauucaagaugcucauauu

SEQ ID NO: 2675283 - RNA, 19 nt, Homo sapiens
  misc_RNA (1)...(19): siRNA sense strand
cuucaguagcccaagaaau

SEQ ID NO: 2675284 - RNA, 19 nt, Homo sapiens
  misc_RNA (1)...(19): siRNA sense strand
aguuguugcugguagagaa

SEQ ID NO: 2675285 - RNA, 19 nt, Homo sapiens
  misc_RNA (1)...(19): siRNA sense strand
cugaagcacuuaaagaaga

SEQ ID NO: 2675286 - RNA, 19 nt, Homo sapiens
  misc_RNA (1)...(19): siRNA sense strand
aauucaggaggaagaaaua

SEQ ID NO: 2675287 - RNA, 19 nt, Homo sapiens
  misc_RNA (1)...(19): siRNA sense strand
aaaugagacuuuugaggaa

SEQ ID NO: 2675288 - RNA, 19 nt, Homo sapiens
  misc_RNA (1)...(19): siRNA sense strand
cugaauaucuuuccuacua

SEQ ID NO: 2675289 - RNA, 19 nt, Homo sapiens
  misc_RNA (1)...(19): siRNA sense strand
ggaagagagugaggcauuu

SEQ ID NO: 2675290 - RNA, 19 nt, Homo sapiens
  misc_RNA (1)...(19): siRNA sense strand
agaaauugaaacaggaaac

SEQ ID NO: 2675291 - RNA, 19 nt, Homo sapiens
  misc_RNA (1)...(19): siRNA sense strand
guaccaagaaucaauacua

SEQ ID NO: 2675292 - RNA, 19 nt, Homo sapiens
  misc_RNA (1)...(19): siRNA sense strand
ccauaaaaugugaacgaga

SEQ ID NO: 2675293 - RNA, 19 nt, Homo sapiens
  misc_RNA (1)...(19): siRNA sense strand
ucuagaaaggagaaaugaa

SEQ ID NO: 2675294 - RNA, 19 nt, Homo sapiens
  misc_RNA (1)...(19): siRNA sense strand
aguggaaccuacuauguaa

SEQ ID NO: 2675295 - RNA, 19 nt, Homo sapiens
  misc_RNA (1)...(19): siRNA sense strand
agagaaauugaaacaggaa

SEQ ID NO: 2675296 - RNA, 19 nt, Homo sapiens
  misc_RNA (1)...(19): siRNA sense strand
gagaaaugaagaacuugaa

SEQ ID NO: 2675297 - RNA, 19 nt, Homo sapiens
  misc_RNA (1)...(19): siRNA sense strand
aauaaaaguugaggaggaa

SEQ ID NO: 2675298 - RNA, 19 nt, Homo sapiens
  misc_RNA (1)...(19): siRNA sense strand
acgagagaugaaaguauua

SEQ ID NO: 2675299 - RNA, 19 nt, Homo sapiens
  misc_RNA (1)...(19): siRNA sense strand
gaucuggacaguggaaaua
